(19) United States
(12) Patent Application Publication
(10) Pub. No.: US 2025/0368750 A1
(43) Pub. Date: Dec. 4, 2025

(54) SHP INHIBITOR COMPOSITIONS AND USES FOR CHIMERIC ANTIGEN RECEPTOR THERAPY

(71) Applicants: Novartis AG, Basel (CH); The Trustees of the University of Pennsylvania, Philadelphia, PA (US)

(72) Inventors: Steven M. Albelda, Philadelphia, PA (US); Edmund K. Moon, Bryn Mawr, PA (US)

(21) Appl. No.: 18/981,066

(22) Filed: Dec. 13, 2024

Related U.S. Application Data
(63) Continuation of application No. 16/489,018, filed on Aug. 27, 2019, now abandoned.
(60) Provisional application No. 62/464,944, filed on Feb. 28, 2017.
(60) Provisional application No. 62/500,806, filed on May 3, 2017.

(51) Int. Cl. C07K 16/30; A61K 31/7088; A61K 31/713; A61K 38/46; A61K 39/00; A61K 40/11; A61K 40/31; A61K 40/42; A61K 45/06; A61P 35/00; C07K 14/705; C12N 5/0783; C12N 9/16; C12N 9/22; C12N 15/11; C12N 15/113

(52) U.S. Cl. CPC C07K 16/30; A61K 31/7088; A61K 31/713; A61K 38/465; A61K 40/11; A61K 40/31; A61K 40/421; A61K 40/4255; A61K 45/06; A61P 35/00; C07K 14/70521; C12N 5/0636; C12N 9/16; C12N 9/22; C12N 15/11; C12N 15/1138; C12Y 301/03048; A61K 2039/505; A61K 2239/31; A61K 2239/38; A61K 2239/46; C07K 2319/02; C07K 2319/03; C07K 2319/30; C07K 2319/33; C12N 2310/111; C12N 2310/122; C12N 2310/14; C12N 2310/20; C12N 2310/531; C12N 2800/80

(57) ABSTRACT

Compositions and methods for treating diseases associated with expression of a cancer associated antigen are disclosed. The invention also relates to chimeric antigen receptor (CAR) specific to a cancer associated antigen as described herein, SHP inhibitory molecules, vectors encoding the same, and recombinant immune effector cells comprising the CARs and SHP inhibitory molecules. Methods of administering a genetically modified immune effector cell expressing a CAR that comprises an antigen binding domain that binds to a cancer associated antigen and a SHP inhibitory polypeptide are also disclosed.

### CROSS-REFERENCE TO RELATED APPLICATION

[0001] This application is a Continuation of U.S. Ser. No. 16/489,018, filed Aug. 27, 2019, which is a US national phase of International Application No. PCT/US2018/020275, filed Feb. 28, 2018, which claims priority to U.S. Ser. No. 62/500,806 filed May 3, 2017 and U.S. Ser. No. 62/464,944 filed Feb. 28, 2017, the content of each of which is incorporated herein by reference in its entirety.

### REFERENCE TO AN ELECTRONIC SEQUENCE LISTING

[0002] The instant application contains a Sequence Listing which has been submitted electronically in ST.26 (XML) format and is hereby incorporated by reference in its entirety. Said XML copy, created on Aug. 27, 2025, is named “046483-7162xx.xml” and is 3,671,958 bytes in size.

### FIELD OF THE INVENTION

[0003] The present invention relates generally to compositions and uses of immune effector cells (e.g., T cells, NK cells) engineered to express a Chimeric Antigen Receptor (CAR) to treat a disease associated with expression of a tumor antigen.

### BACKGROUND OF THE INVENTION

[0004] Adoptive cell transfer (ACT) therapy with autologous T-cells, especially with T-cells transduced with Chimeric Antigen Receptors (CARs), has shown promise in cancer clinical trials. Although CAR technology has demonstrated tremendous success in eliminating hematologic tumors, the need exists for decreasing the effect of immunosuppressive factors that exist with the microenvironment of solid tumors that reduce the activity of CAR T cells.

[0005] One type of immunosuppression that has received much attention in the field of cancer immunotherapy relates to inhibitory receptors (IRs), or checkpoint molecules (Pardoll D M. Nat Rev Cancer April; 12(4):252-64). Examples of IRs include PD-1 (programmed death 1), CTLA-4 (cytotoxic T-lymphocyte associated protein 4), Tim-3 (T-cell immunoglobulin and mucin-domain containing-3), and Lag-3 (lymphocyte activation gene-3). IRs were initially described in naturally occurring tumor infiltrating lymphocytes (TILs) or in chronic viral infections, but are known to also play a role in the suppression of CAR and TCR-engineered T cells upon infiltration into solid tumors (Moon E K et al. C/in Cancer Res August 15; 20(16):4262-73; Moon E K et al. C/in Cancer Res. 2016 Jan. 15; 22(2):436-47). Checkpoint blockade with antibodies againt IRs has demonstrated success in some settings (Moon et al. 2016 supra; Topalian S L et al. N Engl J Med June 28; 366(26):2443-54; Woo S R, Tumis M E, Goldberg M V, Bankoti J, Selby M, Nirschl C J, et al. Cancer Res February 15; 72(4):917-27).

[0006] Accordingly, the need exists to develop CAR therapies that address the immunosuppressive effects of the cancer microenvironment, including CAR therapies that reduce the effects of multiple IRs simultaneously.

### SUMMARY OF THE INVENTION

[0007] The present invention pertains, at least in part, to compositions and uses that improve an activity (e.g., one or more of function, persistence, cancer killing effect, or tumor infiltration) of an immune effector cell, e.g., a population of immune effector cells (e.g., T cells, NK cells). In some embodiments, the immune effector cell expresses a Chimeric Antigen Receptor molecule (e.g., a CAR polypeptide) that binds to a tumor antigen. In some embodiments, the immune effector cell comprises, or is contacted with an inhibitor of a Src homology region 2 domain-containing phosphatase (SHP). In one embodiment, the inhibitor is an inhibitor of SHP-1. In another embodiment, the inhibitor is an inhibitor of SHP-2. In one embodiment, the SHP inhibitor interferes with SHP signaling (e.g., interferes with SHP-1 signaling or SHP-2 signaling, or both), also referred to herein as an SHP inhibitor molecule (e.g., an SHP inhibitor polypeptide). Without wishing to be bound by theory, SHP inhibition is expected to interfere with the signaling of immunosuppressive factors, such as inhibitory receptors (IRs), or checkpoint molecules. In certain embodiments, the IRs present in the microenvironment of a tumor, e.g., a solid tumor can result in decreased effectiveness of a therapy, e.g., a CAR therapy.

[0008] In some embodiments, the SHP inhibitor is a dominant negative molecule that interferes with SHP signaling in a cell, e.g., an immune effector cell, e.g., an immune effector cell that expresses a CAR molecule (e.g., a CAR polypeptide) that binds to a tumor antigen. The SHP inhibitor can reduce the effects of multiple IRs simultaneously by inhibiting a signaling component of multiple IR pathways. In some embodiments, the SHP inhibitor molecule includes a mutation in the N-terminal region of the SHP, e.g., the N—SH2 region of an SHP, e.g., an SHP-1 or SHP-2. In some embodiments, the mutation is in the binding region of the N—SH2 region for an Immunoreceptor Tyrosine-based Inhibitory Motif (ITIM), e.g., an ITIM-domain present in an IR, e.g., PD-1. In some embodiments, the N—SH2 mutation is at position 30 of SHP-1, e.g., an R30K substitution in SHP-1 as described herein. Alternatively or in combination with the N—SH2 region mutation, the SHP inhibitor has a mutation in, e.g., a deletion of, part or all of the catalytic domain, e.g., the phosphatase domain, of an SHP, e.g., an SHP-1 or SHP-2. In embodiments, the SHP-inhibitor interferes with the IR-signaling pathway. For example, the SHP inhibitor molecules described herein, when expressed in an immune effector cell, e.g., a CAR-expressing immune effector cell, result in one or more of: (i) reduced immune checkpoint inhibition, e.g., IR inhibitor, (ii) reduced IR signaling, e.g., PD-1/PD-L1 signalling, (iii) increased levels of CD3z phosphorylation, (iv) increased levels of LAT phosphorylation, (v) increased phosphorylation of Lck, (vi) increased phosphorylation of ZAP70, (vii) increased expression of a cytokine, e.g., IFNγ or IL2, (viii) increased CAR and/or TCR signalling, (ix) increased killing of a tumor cell, e.g., a solid tumor cell, via a CAR molecule, in vitro and in vivo, e.g., compared to an otherwise similar cell that lacks the SHP inhibitor molecule. Accordingly, disclosed herein are, inter alia, nucleic acid compositions encoding the aforesaid SHP inhibitor polypeptides with or without a CAR molecule, immune effector cells comprising the nucleic acid compositions, vectors, as well as methods for making and using, e.g., in a CAR therapy, the aforesaid compositions.

[0009] Accordingly, in one aspect, the invention pertains to a nucleic acid composition comprising:
[0010] (a) a nucleic acid molecule encoding a chimeric antigen receptor (CAR) molecule, e.g., a CAR polypeptide; and
[0011] (b) a nucleic acid molecule encoding an SHP inhibitor molecule, e.g., an SHP polypeptide, wherein said SHP inhibitor polypeptide comprises a mutation (e.g., one or more deletions or substitutions) in an SHP polypeptide (e.g., an SHP-1 polypeptide of SEQ ID NO:1, or an SHP-2 polypeptide of SEQ ID NO:2).

[0012] In another aspect, the invention pertains to a polypeptide comprising a CAR polypeptide and a SHP inhibitor polypeptide, e.g., as described herein. In some embodiments, the polypeptide a peptide cleavage site disposed between the CAR polypeptide and the SHP inhibitor polypeptide. In some embodiments, the SHP inhibitor polypeptide comprises a mutation (e.g., one or more deletions or substitutions) in an SHP polypeptide (e.g., an SHP-1 polypeptide of SEQ ID NO:1, or an SHP-2 polypeptide of SEQ ID NO:2. In some embodiments, the peptide cleavage site is a T2A site. In some embodiments, the peptide cleavage site is a P2A site.

[0013] In some embodiments, the SHP inhibitor polypeptide of any nucleic acid composition or polypeptide disclosed herein comprises one, two or all of the following:
[0014] (i) a mutation (e.g., one or more deletions or substitutions) in an SH2 domain, e.g., an N-terminal SH2 domain or a C-terminal SH2 domain, or both, e.g., of an SHP polypeptide;
[0015] (ii) a mutation (e.g., one or more deletions or substitutions) in an ITIM-binding region of an SHP polypeptide (e.g., an ITIM-binding region of an SH2 domain, e.g., an ITIM-binding region of the N-terminal SH2 domain), or
[0016] (iii) a mutation (e.g., one or more deletions or substitutions) in a catalytic domain, e.g., the phosphatase domain of an SHP polypeptide.

[0017] In other embodiments, the SHP inhibitor polypeptide comprises the following:
[0018] (i) a mutation (e.g., one or more deletions or substitutions) in an ITIM-binding region of an SHP polypeptide (e.g., an ITIM-binding region of an SH2 domain, e.g., an ITIM-binding region of the N-terminal SH2 domain) of an SHP polypeptide, and
[0019] (ii) a mutation (e.g., one or more deletions or substitutions) in a catalytic domain, e.g., the phosphatase domain of an SHP polypeptide.

[0020] In some embodiments, the CAR polypeptide is a CAR polypeptide as described herein, e.g., comprises an antigen binding domain, a transmembrane domain, and an intracellular domain as described herein.

### SHP Inhibitor Molecules

[0021] Additional features or embodiments of the SHP inhibitor molecules, e.g., SHP inhibitor polypeptide as used herein, e.g., in the context of the nucleic acid compositions, polypeptides, vectors, immune effector cells, methods of use or making, include one or more of the following:

[0022] In some embodiments, the SHP inhibitor polypeptide has reduced binding, compared to a wild-type SHP, to an ITIM domain, e.g., an ITIM domain from one or more of the following proteins: PD-1, PDCD1, BTLA4, LILRB1, LAIR1, CTLA-4, KIR2DL 1, KIR2DL4, KIR2DL5, KIR3DL 1 or KIR3DL3.

[0023] In some embodiments, the binding of the SHP inhibitor polypeptide to the ITIM domain is reduced by at least 10%, 20%, 30%, 40%, 50%, 60%, 70%, 80%, 90%, 95%, 97%, or 99% compared to a wild-type SHP.

[0024] In some embodiments, the SHP inhibitor polypeptide (e.g., SHP-1 inhibitor polypeptide or SHP-2 polypeptide) is less than 240, 220, 180, 160, 140, 120, 100, 80, 60, or 40 amino acids in length.

[0025] In some embodiments, the SHP inhibitor polypeptide (e.g., SHP-1 inhibitor polypeptide) comprises amino acids 1-240, 1-220, 1-180, 1-160, 1-140, 1-120, 1-100, 1-80, 1-60, or 1-40 amino acids of SEQ ID NO: 1, or an amino acid sequence substantially identical thereto, e.g., at least 90%, 95%, 97%, 98%, or 99% identical thereto.

[0026] In some embodiments, the SHP inhibitor polypeptide (e.g., SHP-1 inhibitor polypeptide) comprises an N-terminal SH2 domain, e.g., corresponding to about amino acid 4 to about 100, of SEQ ID NO: 1; or the C-terminal SH2 domain, e.g., corresponding to about amino acid 110 to about 213, of SEQ ID NO:1, or both, or an amino acid sequence substantially identical thereto, e.g., at least 90%, 95%, 97%, 98%, or 99% identical thereto.

[0027] In some embodiments, the SHP inhibitor polypeptide (e.g., SHP-1 inhibitor polypeptide) comprises an amino acid sequence at least 90%, 95%, 97%, 98%, or 99% identical to SEQ ID NO: 3, wherein X is any amino acid except R.

[0028] In some embodiments, the SHP inhibitor polypeptide (e.g., SHP-1 inhibitor polypeptide) comprises an amino acid sequence at least 90%, 95%, 97%, 98%, or 99% identical to SEQ ID NO: 3, wherein X is K or H.

[0029] In some embodiments, the SHP inhibitor polypeptide (e.g., SHP-1 inhibitor polypeptide) comprises an amino acid sequence at least 90%, 95%, 97%, 98%, or 99% identical to SEQ ID NO: 3, wherein X is K.

[0030] In some embodiments, the SHP inhibitor polypeptide (e.g., SHP-1 inhibitor polypeptide) comprises or consists of the amino acid sequence according to SEQ ID NO: 3, wherein X is any amino acid except R.

[0031] In some embodiments, the SHP inhibitor polypeptide (e.g., SHP-1 inhibitor polypeptide) comprises or consists of the amino acid sequence according to SEQ ID NO: 3, wherein X is K or H.

[0032] In some embodiments, the SHP inhibitor polypeptide (e.g., SHP-1 inhibitor polypeptide) comprises or consists of the amino acid sequence according to SEQ ID NO: 3, wherein X is K.

[0033] In some embodiments, the SHP inhibitor polypeptide (e.g., SHP-1 inhibitor polypeptide) comprises the amino acid sequence of SEQ ID NO: 1 or SEQ ID NO: 3, or an amino acid sequence at least 90%, 95%, 97%, 98%, or 99% identical to SEQ ID NO: 1 or 3, wherein the R at position 33 is substituted with any amino acid except R.

[0034] In some embodiments, the SHP inhibitor polypeptide (e.g., SHP-1 inhibitor polypeptide) comprises the amino acid sequence of SEQ ID NO: 1 or SEQ ID NO: 3, or an amino acid sequence at least 90%, 95%, 97%, 98%, or 99% identical to SEQ ID NO: 1 or 3, wherein the R at position 33 is substituted with glutamic acid (E).

[0035] In some embodiments, the SHP inhibitor polypeptide (e.g., SHP-1 inhibitor polypeptide) comprises the amino acid sequence of SEQ ID NO: 1, or an amino acid sequence at least 90%, 95%, 97%, 98%, or 99% identical to SEQ ID NO: 1, wherein the R at position 136 is substituted with any amino acid except R.

[0036] In some embodiments, the SHP inhibitor polypeptide (e.g., SHP-1 inhibitor polypeptide) comprises the amino acid sequence of SEQ ID NO: 1, or an amino acid sequence at least 90%, 95%, 97%, 98%, or 99% identical to SEQ ID NO: 1, wherein the R at position 136 is substituted with lysine (K).

[0037] In some embodiments, the SHP inhibitor polypeptide (e.g., SHP-1 inhibitor polypeptide) comprises the amino acid sequence of SEQ ID NO: 1, or an amino acid sequence at least 90%, 95%, 97%, 98%, or 99% identical to SEQ ID NO: 1, wherein the C at position 453 is substituted with any amino acid except C.

[0038] In some embodiments, the SHP inhibitor polypeptide (e.g., SHP-1 inhibitor polypeptide) comprises the amino acid sequence of SEQ ID NO: 1, or an amino acid sequence at least 90%, 95%, 97%, 98%, or 99% identical to SEQ ID NO: 1, wherein the C at position 453 is substituted with serine (S).

[0039] In some embodiments, the SHP inhibitor polypeptide (e.g., SHP-1 inhibitor polypeptide) comprises the amino acid sequence of SEQ ID NO: 1, or an amino acid sequence at least 90%, 95%, 97%, 98%, or 99% identical to SEQ ID NO: 1, wherein the R at position 459 is substituted with any amino acid except R.

[0040] In some embodiments, the SHP inhibitor polypeptide (e.g., SHP-1 inhibitor polypeptide) comprises the amino acid sequence of SEQ ID NO: 1, or an amino acid sequence at least 90%, 95%, 97%, 98%, or 99% identical to SEQ ID NO: 1, wherein the R at position 459 is substituted with methionine (M).

[0041] In some embodiments, the SHP inhibitor polypeptide (e.g., SHP-1 inhibitor polypeptide) comprises the amino acid sequence of SEQ ID NO: 1, or an amino acid sequence at least 90%, 95%, 97%, 98%, or 99% identical to SEQ ID NO: 1, wherein one, two, three or more of the R at position 30, the R at position 33, the R at position 136, the C at position 453, and the R at position 459 is substituted with an amino acid other than that specified by SEQ ID NO: 1 at that position.

[0042] In some embodiments, the SHP inhibitor polypeptide (e.g., SHP-2 inhibitor polypeptide) comprises amino acids 1-240, 1-220, 1-180, 1-160, 1-140, 1-120, 1-100, 1-80, 1-60, or 1-40 amino acids of SEQ ID NO: 2, or an amino acid sequence substantially identical thereto, e.g., at least 90%, 95%, 97%, 98%, or 99% identical thereto.

[0043] In some embodiments, the SHP inhibitor polypeptide (e.g., SHP-2 inhibitor polypeptide) comprises a sequence at least 90%, 95%, 97%, 98%, or 99% identical to SEQ ID NO: 4, wherein X is any amino acid except R.

[0044] In some embodiments, the SHP inhibitor polypeptide (e.g., SHP-2 inhibitor polypeptide) comprises a sequence at least 90%, 95%, 97%, 98%, or 99% identical to SEQ ID NO: 4, wherein X is K or H.

[0045] In some embodiments, the SHP inhibitor polypeptide (e.g., SHP-2 inhibitor polypeptide) comprises a sequence at least 90%, 95%, 97%, 98%, or 99% identical to SEQ ID NO: 4, wherein X is K.

[0046] In some embodiments, the SHP inhibitor polypeptide (e.g., SHP-2 inhibitor polypeptide) comprises or consists of a sequence according to SEQ ID NO: 4, wherein X is any amino acid except R.

[0047] In some embodiments, the SHP inhibitor polypeptide (e.g., SHP-2 inhibitor polypeptide) comprises or consists of a sequence according to SEQ ID NO: 4, wherein X is K or H.

[0048] In some embodiments, the SHP inhibitor polypeptide (e.g., SHP-2 inhibitor polypeptide) comprises or consists of a sequence according to SEQ ID NO: 4, wherein X is K.

[0049] In some embodiments, the SHP inhibitor polypeptide has reduced phosphatase activity, compared to wild-type SHP, to one or more SHP substrates (e.g., substrates comprising phosphorylated tyrosine).

[0050] In some embodiments, the SHP inhibitor polypeptide has a deletion of at least part or all of the phosphatase domain.

[0051] In some embodiments, the SHP inhibitor polypeptide lacks its phosphatase domain.

[0052] In some embodiments, the SHP inhibitor polypeptide, when expressed in an immune effector cell (e.g., a T cell), results in one or more of:
[0053] (i) increased CAR signalling;
[0054] (ii) increased TCR signaling;
[0055] (iii) reduced immune checkpoint inhibition;
[0056] (iv) reduced PD-1/PD-L1 signalling;
[0057] (v) increased levels of CD3z phosphorylation;
[0058] (vi) increased levels of LAT phosphorylation;
[0059] (vii) increased phosphorylation of Lck;
[0060] (viii) increased phosphorylation of ZAP70;
[0061] (ix) increased expression of a cytokine, e.g., IFNγ or IL2,
[0062] or a combination of two, three, four, five, six or all of (i)-(ix), e.g., compared to an otherwise similar cell that lacks the SHP inhibitor polypeptide.

[0063] In some embodiments, the SHP inhibitor polypeptide, when expressed in an immune effector cell (e.g., a T cell), does not result (e.g., does not substantially result, e.g., results in less than 10%, 9%, 8%, 7%, 6%, 5% or less change) in one of more of the following:
[0064] (i) inhibition of CAR signalling;
[0065] (ii) inhibition of TCR signaling;
[0066] (iii) promotion of immune checkpoint inhibition,
[0067] (iv) promotion of PD-1/PD-L1 signalling;
[0068] (v) inhibition of phosphorylation of CD3z;
[0069] (vi)inhibition of LAT (linker for activation of T cells) phosphorylation,
[0070] (vii) dephosphorylation of Lck (lymphocyte-specific protein tyrosine kinase), or a combination of two, three, four, five, six or all of (i)-(vii), e.g., compared to an otherwise similar cell that lacks the SHP inhibitor polypeptide.

[0071] In some embodiments, the SHP inhibitor polypeptide, when expressed in an immune effector cell (e.g., a T cell) that also expresses a CAR polypeptide (e.g., an immune effector cell that expresses PD-1), results in increased cytokine secretion and/or increases the percentage of cytokine-expressing cells, wherein the cytokine is optionally IL-2, compared to an otherwise similar cell lacking the SHP inhibitor polypeptide or an otherwise similar cell comprising a SHP inhibitor polypeptide according to amino acids 1-100 of SEQ ID NO: 1, e.g., as shown in FIG. 10.

[0072] In some embodiments, cytokine secretion is increased by at least 2, 3, 4, 5, 6, 8, 10, 12, 14, 16, 18, or 20-fold.

[0073] In some embodiments, the SHP inhibitor polypeptide, when expressed in an immune effector cell (e.g., a T cell) that also expresses a CAR polypeptide (e.g., an immune effector cell that expresses PD-1), results in increased lysis, e.g., in vitro, of cancer cells that express PD-L1 and an antigen recognized by the CAR polypeptide, compared to an otherwise similar cell that lacks the SHP inhibitor polypeptide or an otherwise similar cell comprising a SHP inhibitor polypeptide according to amino acids 1-100 of SEQ ID NO: 1, e.g., as shown in FIG. 11.

[0074] In some embodiments, cancer cell lysis is increased at least 1.1-fold, 1.2-fold, 1.4-fold, 1.6-fold, 1.8-fold, or 2-fold compared to cancer cell lysis in response to an otherwise similar cell that lacks the SHP inhibitor polypeptide or an otherwise similar cell comprising a SHP inhibitor polypeptide according to amino acids 1-100 of SEQ ID NO: 1, e.g., as shown in FIG. 11.

[0075] In some embodiments, the SHP inhibitor polypeptide, when expressed in an immune effector cell (e.g., a T cell) that also expresses a CAR polypeptide (e.g., an immune effector cell that expresses PD-1), results in decreased tumor volume (e.g., of a tumor having cells expressing PD-L1 and an antigen recognized by the CAR polypeptide), e.g., in a mouse model, compared to an otherwise similar animal treated with otherwise similar immune effector cells that that lack the SHP inhibitor polypeptide or an otherwise similar cell comprising a SHP inhibitor polypeptide according to amino acids 1-100 of SEQ ID NO: 1, e.g., as shown in FIG. 12.

[0076] In some embodiments, the tumor volume is less by about 10%, 20%, 30%, 40%, 50%, 60%, 70%, 80%, or 90% than the tumor volume at the same timepoint in the presence of an otherwise similar cell that lacks the SHP inhibitor polypeptide or an otherwise similar cell comprising a SHP inhibitor polypeptide according to amino acids 1-100 of SEQ ID NO: 1, e.g., as shown in FIG. 12.

[0077] In some embodiments, the SHP inhibitor polypeptide, when expressed in an immune effector cell (e.g., a T cell) that also expresses a CAR polypeptide (e.g., an immune effector cell that expresses PD-1), results in increased T lymphocyte infiltration into a tumor, e.g., in a mouse model, compared to an otherwise similar animal treated with otherwise similar immune effector cells that that lack the SHP inhibitor polypeptide or an otherwise similar cell comprising a SHP inhibitor polypeptide according to amino acids 1-100 of SEQ ID NO: 1, e.g., as shown in FIG. 13.

[0078] In some embodiments, T lymphocyte infiltration is increased at least 1.1-fold, 1.2-fold, 1.4-fold, 1.6-fold, 1.8-fold, 2-fold, 3-fold, 4-fold, or 5-fold and/or wherein infiltrating T lymphocytes represent at least about 10%, 20%, 30%, 40%, or 50% of cells in the tumor.

[0079] In some embodiments, the SHP inhibitor polypeptide, when expressed in an immune effector cell (e.g., a T cell) that also expresses a CAR polypeptide, results in increased phosphorylation of ZAP70, e.g., in the presence of PD-L1-expressing tumor cells, compared to an otherwise similar immune effector cell that lacks the SHP inhibitor polypeptide or an otherwise similar cell comprising a wild type SHP polypeptide, or a wild type SH2-N terminal fragment thereof according to amino acids 1-100 of SEQ ID NO: 1, e.g., as shown in FIG. 16B.

[0080] In some embodiments, the SHP inhibitor polypeptide, when expressed in an immune effector cell (e.g., a T cell) that also expresses a CAR polypeptide, results in increased expression of IFNγ or IL-2 (or increased percentage of IFNγ positive or IL-2 positive cells), e.g., in the presence of PD-L1-expressing tumor cells, compared to an otherwise similar immune effector cell that lacks the SHP inhibitor polypeptide or an otherwise similar cell comprising a wild type SHP polypeptide, or a wild type SH2-N terminal fragment thereof according to amino acids 1-100 of SEQ ID NO: 1, e.g., as shown in FIG. 17.

[0081] In some embodiments, the nucleic acid composition comprises:
[0082] (a) a nucleic acid molecule encoding a chimeric antigen receptor (CAR) polypeptide,
[0083] (b) a nucleic acid molecule encoding an SHP1 inhibitor polypeptide, wherein said SHP1 inhibitor polypeptide comprises:
   [0084] (i) a mutation (e.g., one or more deletions or substitutions) in the ITIM-binding region (e.g., an SH2 domain, e.g., the N-terminal SH2 domain) of an SHP1 polypeptide, and
   [0085] (ii) a mutation (e.g., one or more deletions or substitutions) in a catalytic domain e.g., the phosphatase domain, of an SHP1 polypeptide, and
[0086] (c) a nucleic acid molecule encoding an SHP2 inhibitor polypeptide, wherein said SHP2 inhibitor polypeptide comprises:
   [0087] (i) a mutation (e.g., one or more deletions or substitutions) in the ITIM-binding region (e.g., an SH2 domain, e.g., the N-terminal SH2 domain) of an SHP2 polypeptide, and
   [0088] (ii) a mutation (e.g., one or more deletions or substitutions) in a catalytic domain e.g., the phosphatase domain, of an SHP2 polypeptide.

[0089] In some embodiments, the SHP1 inhibitor polypeptide comprises or consists of the amino acid sequence of SEQ ID NO: 41 or 42 (or an amino acid sequence substantially identical thereto, e.g., at least 90%, 95%, 97%, 98%, or 99% identical thereto). In some embodiments, the SHP2 inhibitor polypeptide comprises or consists of the amino acid sequence of SEQ ID NO: 44 or 45 (or an amino acid sequence substantially identical thereto, e.g., at least 90%, 95%, 97%, 98%, or 99% identical thereto). In some embodiments, the SHP1 inhibitor polypeptide comprises or consists of the amino acid sequence of SEQ ID NO: 41 or 42, and the SHP2 inhibitor polypeptide comprises or consists of the amino acid sequence of SEQ ID NO: 44 or 45. In some embodiments, the SHP1 inhibitor polypeptide comprises or consists of the amino acid sequence of SEQ ID NO: 41 and the SHP2 inhibitor polypeptide comprises or consists of the amino acid sequence of SEQ ID NO: 44. In some embodiments, the SHP1 inhibitor polypeptide comprises or consists of the amino acid sequence of SEQ ID NO: 41 and the SHP2 inhibitor polypeptide comprises or consists of the amino acid sequence of SEQ ID NO: 45. In some embodiments, the SHP1 inhibitor polypeptide comprises or consists of the amino acid sequence of SEQ ID NO: 42 and the SHP2 inhibitor polypeptide comprises or consists of the amino acid sequence of SEQ ID NO: 44. In some embodiments, the SHP1 inhibitor polypeptide comprises or consists of the amino acid sequence of SEQ ID NO: 42 and the SHP2 inhibitor polypeptide comprises or consists of the amino acid sequence of SEQ ID NO: 45.

[0090] In some embodiments, the CAR polypeptide and SHP inhibitor polypeptide are encoded by a single nucleic acid molecule in the same frame and as a single polypeptide chain. In some embodiments, the nucleic acid molecule encoding the CAR polypeptide and the nucleic acid molecule encoding the SHP inhibitor polypeptide are separated by a nucleic acid sequence encoding T2A or P2A. In some embodiments, the nucleic acid molecule encoding the CAR polypeptide, the nucleic acid molecule encoding the SHP1 inhibitor polypeptide, and the nucleic acid molecule encoding the SHP2 inhibitor polypeptide are separated by a nucleic acid sequence encoding T2A or P2A.

### CAR Molecules

[0091] Additional features or embodiments of the CAR molecules (e.g., CAR-containing nucleic acids (e.g., nucleic acid encoding CAR polypeptides), or CAR polypeptides (e.g., encoded CAR polypeptides), as used herein), e.g., in the context of the nucleic acid compositions, polypeptides, vectors, immune effector cells, methods of use or making, include one or more of the following:

[0092] In some embodiments, the SHP inhibitor polypeptide is attached to the N-terminus of a CAR polypeptide or the C-terminus of said CAR polypeptide.

[0093] In some embodiments, the SHP inhibitor polypeptide and the CAR polypeptide are separated by one or more peptide cleavage sites. In some embodiments, said peptide cleavage site is an auto-cleavage site or a substrate for an intracellular protease. In some embodiments, said peptide cleavage site is a T2A site. In some embodiments, said peptide cleavage site is a P2A site. In some embodiments, the nucleic acid molecule encoding the CAR polypeptide and the nucleic acid molecule encoding the SHP inhibitor polypeptide are separated by a nucleic acid sequence encoding T2A or P2A. In some embodiments, the nucleic acid molecule encoding the CAR polypeptide, the nucleic acid molecule encoding the SHP1 inhibitor polypeptide, and the nucleic acid molecule encoding the SHP2 inhibitor polypeptide are separated by a nucleic acid sequence encoding T2A or P2A.

[0094] In some embodiments, said CAR polypeptide and said SHP inhibitor polypeptide are encoded by a single nucleic acid molecule and are not expressed as a single polypeptide.

[0095] In some embodiments, the expression of said CAR polypeptide and said SHP inhibitor polypeptide is controlled by a common promoter.

[0096] In some embodiments, the nucleic acid encoding said CAR polypeptide and the nucleic acid encoding said SHP inhibitor polypeptide are separated by an internal ribosomal entry site.

[0097] In some embodiments, the expression of said CAR polypeptide and said SHP inhibitor polypeptide is controlled by separate promoters.

[0098] In some embodiments, the nucleic acid composition described herein consists of a single isolated nucleic acid.

[0099] In some embodiments, the CAR molecule (e.g., the CAR polypeptide (e.g., the encoded CAR polypeptide) or a nucleic acid encoding the CAR), comprises an antigen binding domain, a transmembrane domain, and an intracellular signalling domain.

[0100] In some embodiments, the intracellular domain of the CAR molecule comprises a primary signaling domain, a costimulatory domain, or both of a primary signaling domain and a costimulatory domain.

[0101] In some embodiments, the primary signaling domain of the CAR molecule comprises a functional signaling domain of one or more proteins selected from the group consisting of CD3 zeta, CD3 gamma, CD3 delta, CD3 epsilon, common FcR gamma (FCER1G), FcR beta (Fc Epsilon R1b), CD79a, CD79b, Fcgamma RIIa, DAP10, and DAP12, or a functional variant thereof.

[0102] In some embodiments, the costimulatory domain of the CAR molecule comprises a functional domain of one or more proteins selected from the group consisting of CD27, CD28, 4-1BB (CD137), OX40, CD28-OX40, CD28-4-1BB, CD30, CD40, PD-1, ICOS, lymphocyte function-associated antigen-1 (LFA-1), CD2, CD7, LIGHT, NKG2C, B7-H3, a ligand that specifically binds with CD83, CDS, ICAM-1, GITR, BAFFR, HVEM (LIGHTR), SLAMF7, NKp80 (KLRF1), CD160, CD19, CD4, CD8alpha, CD8beta, IL2R beta, IL2R gamma, IL7R alpha, ITGA4, VLA1, CD49a, ITGA4, IA4, CD49D, ITGA6, VLA-6, CD49f, ITGAD, CD11d, ITGAE, CD103, ITGAL, CD11a, LFA-1, ITGAM, CD11b, ITGAX, CD11c, ITGB1, CD29, ITGB2, CD18, LFA-1, ITGB7, TNFR2, TRANCE/RANKL, DNAM1 (CD226), SLAMF4 (CD244, 2B4), CD84, CD96 (Tactile), CEACAM1, CRTAM, Ly9 (CD229), CD160 (BY55), PSGL1, CD100 (SEMA4D), CD69, SLAMF6 (NTB-A, Ly108), SLAM (SLAMF1, CD150, IPO-3), BLAME (SLAMF8), SELPLG (CD162), LTBR, LAT, GADS, SLP-76, PAG/Cbp, NKp44, NKp30, NKp46, and NKG2D, or a functional variant thereof.

[0103] In some embodiments, the antigen binding domain of the CAR molecule binds a tumor antigen. In some embodiments, the tumor antigen is selected from the group consisting of: CD19; CD123; CD22; CD30; CD171; CS-1 (also referred to as CD2 subset 1, CRACC, SLAMF7, CD319, and 19A24); C-type lectin-like molecule-1 (CLL-1 or CLECL1); CD33; epidermal growth factor receptor variant III (EGFRvIII); ganglioside G2 (GD2); ganglioside GD3 (aNeu5Ac(2-8)aNeu5Ac(2-3)bDGalp(1-4)bDGlcp(1-1)Cer); TNF receptor family member B cell maturation (BCMA); Tn antigen ((Tn Ag) or (GalNAca-Ser/Thr)); prostate-specific membrane antigen (PSMA); Receptor tyrosine kinase-like orphan receptor 1 (ROR1); Fms-Like Tyrosine Kinase 3 (FLT3); Tumor-associated glycoprotein 72 (TAG72); CD38; CD44v6; Carcinoembryonic antigen (CEA); Epithelial cell adhesion molecule (EPCAM); B7H3 (CD276); KIT (CD117); Interleukin-13 receptor subunit alpha-2 (IL-13Ra2 or CD213A2); Mesothelin; Interleukin 11 receptor alpha (IL-11Ra); prostate stem cell antigen (PSCA); Protease Serine 21 (Testisin or PRSS21); vascular endothelial growth factor receptor 2 (VEGFR2); Lewis(Y) antigen; CD24; Platelet-derived growth factor receptor beta (PDGFR-beta); Stage-specific embryonic antigen-4 (SSEA-4); CD20; Folate receptor alpha; Receptor tyrosine-protein kinase ERBB2 (Her2/neu); Mucin 1, cell surface associated (MUC1); epidermal growth factor receptor (EGFR); neural cell adhesion molecule (NCAM); Prostase; prostatic acid phosphatase (PAP); elongation factor 2 mutated (ELF2M); Ephrin B2; fibroblast activation protein alpha (FAP); insulin-like growth factor 1 receptor (IGF-I receptor), carbonic anhydrase IX (CAIX); Proteasome (Prosome, Macropain) Subunit, Beta Type, 9 (LMP2); glycoprotein 100 (gp100); oncogene fusion protein consisting of breakpoint cluster region (BCR) and Abelson murine leukemia viral oncogene homolog 1 (Abl) (bcr-abl); tyrosinase; ephrin type-A receptor 2 (EphA2); Fucosyl GM1; sialyl Lewis adhesion molecule (sLe); ganglioside GM3 (aNeu5Ac(2-3)bDGalp(1-4)bDGlcp(1-1)Cer); transglutaminase 5 (TGS5); high molecular weight-melanoma-associated antigen (HMWMAA); o-acetyl-GD2 ganglioside (OAcGD2); Folate receptor beta; tumor endothelial marker 1 (TEM1/CD248); tumor endothelial marker 7-related (TEM7R); claudin 6 (CLDN6); thyroid stimulating hormone receptor (TSHR); G protein-coupled receptor class C group 5, member D (GPRC5D); chromosome X open reading frame 61 (CXORF61); CD97; CD179a; anaplastic lymphoma kinase (ALK); Polysialic acid; placenta-specific 1 (PLAC1); hexasaccharide portion of globoH glycoceramide (GloboH); mammary gland differentiation antigen (NY—BR-1); uroplakin 2 (UPK2); Hepatitis A virus cellular receptor 1 (HAVCR1); adrenoceptor beta 3 (ADRB3); pannexin 3 (PANX3); G protein-coupled receptor 20 (GPR20); lymphocyte antigen 6 complex, locus K 9 (LY6K); Olfactory receptor 51E2 (OR51E2); TCR Gamma Alternate Reading Frame Protein (TARP); Wilms tumor protein (WT1); Cancer/testis antigen 1 (NY-ESO-1); Cancer/testis antigen 2 (LAGE-1a); Melanoma-associated antigen 1 (MAGE-A1); ETS translocation-variant gene 6, located on chromosome 12p (ETV6-AML); sperm protein 17 (SPA17); X Antigen Family, Member 1A (XAGE1); angiopoietin-binding cell surface receptor 2 (Tie 2); melanoma cancer testis antigen-1 (MAD-CT-1); melanoma cancer testis antigen-2 (MAD-CT-2); Fos-related antigen 1; tumor protein p53 (p53); p53 mutant; prostein; survivin; telomerase; prostate carcinoma tumor antigen-1 (PCTA-1 or Galectin 8), melanoma antigen recognized by T cells 1 (MelanA or MART1); Rat sarcoma (Ras) mutant; human Telomerase reverse transcriptase (hTERT); sarcoma translocation breakpoints; melanoma inhibitor of apoptosis (ML-IAP); ERG (transmembrane protease, serine 2 (TMPRSS2) ETS fusion gene); N-Acetyl glucosaminyl-transferase V (NA17); paired box protein Pax-3 (PAX3); Androgen receptor; Cyclin B1; v-myc avian myelocytomatosis viral oncogene neuroblastoma derived homolog (MYCN); Ras Homolog Family Member C (RhoC); Tyrosinase-related protein 2 (TRP-2); Cytochrome P450 1B1 (CYP1B1); CCCTC-Binding Factor (Zinc Finger Protein)-Like (BORIS or Brother of the Regulator of Imprinted Sites), Squamous Cell Carcinoma Antigen Recognized By T Cells 3 (SART3); Paired box protein Pax-5 (PAX5); proacrosin binding protein sp32 (OY-TES1); lymphocyte-specific protein tyrosine kinase (LCK); A kinase anchor protein 4 (AKAP-4); synovial sarcoma, X breakpoint 2 (SSX2); Receptor for Advanced Glycation Endproducts (RAGE-1); renal ubiquitous 1 (RU1); renal ubiquitous 2 (RU2); legumain; human papilloma virus E6 (HPV E6); human papilloma virus E7 (HPV E7); intestinal carboxyl esterase; heat shock protein 70-2 mutated (mut hsp70-2); CD79a; CD79b; CD72; Leukocyte-associated immunoglobulin-like receptor 1 (LAIR1); Fc fragment of IgA receptor (FCAR or CD89); Leukocyte immunoglobulin-like receptor subfamily A member 2 (LILRA2); CD300 molecule-like family member f (CD300LF); C-type lectin domain family 12 member A (CLEC12A); bone marrow stromal cell antigen 2 (BST2); EGF-like module-containing mucin-like hormone receptor-like 2 (EMR2); lymphocyte antigen 75 (LY75); Glypican-3 (GPC3); Fc receptor-like 5 (FCRL5); and immunoglobulin lambda-like polypeptide 1 (IGLL1).

[0104] In some embodiments, the tumor antigen bound by the antigen binding domain of the CAR molecule is selected from CD150, 5T4, ActRIIA, B7, BMCA, CA-125, CCNA1, CD123, CD126, CD138, CD14, CD148, CD15, CD19, CD20, CD200, CD21, CD22, CD23, CD24, CD25, CD26, CD261, CD262, CD30, CD33, CD362, CD37, CD38, CD4, CD40, CD40L, CD44, CD46, CD5, CD52, CD53, CD54, CD56, CD66a-d, CD74, CD8, CD80, CD92, CE7, CS-1, CSPG4, ED-B fibronectin, EGFR, EGFRvIII, EGP-2, EGP-4, EPHa2, ErbB2, ErbB3, ErbB4, FBP, GD2, GD3, HER1-HER2 in combination, HER2-HER3 in combination, HERV-K, HIV-1 envelope glycoprotein gp120, HIV-1 envelope glycoprotein gp41, HLA-DR, HM1.24, HMW-MAA, Her2, Her2/neu, IGF-1R, IL-11Ralpha, IL-13R-alpha2, IL-2, IL-22R-alpha, IL-6, IL-6R, Ia, Ii, L1-CAM, L1-cell adhesion molecule, Lewis Y, L1-CAM, MAGE A3, MAGE-A1, MART-1, MUC1, NKG2C ligands, NKG2D Ligands, NY-ESO-1, OEPHa2, PIGF, PSCA, PSMA, ROR1, T101, TAC, TAG72, TIM-3, TRAIL-R1, TRAIL-R1 (DR4), TRAIL-R2 (DR5), VEGF, VEGFR2, WT-1, a G-protein coupled receptor, alphafetoprotein (AFP), an angiogenesis factor, an exogenous cognate binding molecule (ExoCBM), oncogene product, anti-folate receptor, c-Met, carcinoembryonic antigen (CEA), cyclin (D1), ephrinB2, epithelial tumor antigen, estrogen receptor, fetal acethycholine e receptor, folate binding protein, gp100, hepatitis B surface antigen, kappa chain, kappa light chain, kdr, lambda chain, livin, melanoma-associated antigen, mesothelin, mouse double minute 2 homolog (MDM2), mucin 16 (MUC16), mutated p53, mutated ras, necrosis antigens, oncofetal antigen, ROR2, progesterone receptor, prostate specific antigen, tEGFR, tenascin, 02-Microglobulin, Fc Receptor-like 5 (FcRL5), or molecules expressed by HIV, HCV, HBV, or other pathogens.

[0105] In some embodiments, the tumor antigen bound by the antigen binding domain of the CAR molecule is in a solid tumor antigen, e.g., mesothelin.

[0106] In some embodiments, the tumor antigen bound by the antigen binding domain of the CAR molecule is expressed in a solid tumor that also expresses an immune checkpoint inhibitor, e.g., PD-L1.

[0107] In some embodiments, the antigen binding domain of the antigen binding domain of the CAR molecule comprises an antibody, an antibody fragment, an scFv, a Fv, a Fab, a (Fab′)2, a single domain antibody (SDAB), a VH or VL domain, or a camelid VHH domain.

[0108] In some embodiments, the transmembrane domain of the CAR molecule comprises a transmembrane domain of a protein selected from the group consisting of the alpha, beta or zeta chain of the T-cell receptor, CD28, CD3 epsilon, CD45, CD4, CD5, CD8, CD9, CD16, CD22, CD33, CD37, CD64, CD80, CD86, CD134, CD137, CD154, KIRDS2, OX40, CD2, CD27, LFA-1 (CD11a, CD18), ICOS (CD278), 4-1BB (CD137), GITR, CD40, BAFFR, HVEM (LIGHTR), SLAMF7, NKp80 (KLRF1), CD160, CD19, IL2R beta, IL2R gamma, IL7R α, ITGA1, VLA1, CD49a, ITGA4, IA4, CD49D, ITGA6, VLA-6, CD49f, ITGAD, CD11d, ITGAE, CD103, ITGAL, CD11a, LFA-1, ITGAM, CD11b, ITGAX, CD11c, ITGB1, CD29, ITGB2, CD18, LFA-1, ITGB7, TNFR2, DNAM1 (CD226), SLAMF4 (CD244, 2B4), CD84, CD96 (Tactile), CEACAM1, CRTAM, Ly9 (CD229), CD160 (BY55), PSGL1, CD100 (SEMA4D), SLAMF6 (NTB-A, Ly108), SLAM (SLAMF1, CD150, IPO-3), BLAME (SLAMF8), SELPLG (CD162), LTBR, PAG/Cbp, NKp44, NKp30, NKp46, NKG2D, and NKG2C, or a functional variant thereof.

[0109] In some embodiments, the antigen binding domain of the CAR molecule is connected to the transmembrane domain by a hinge region.

[0110] In some embodiments, one or both nucleic acid molecule(s) further encodes a leader sequence.

[0111] In some embodiments, one or both nucleic acid molecule(s) is DNA or RNA.

[0112] In another aspect, the invention pertains to a vector comprising a nucleic acid composition described herein, wherein the vector is selected from the group consisting of a DNA vector, an RNA vector, a plasmid, a lentivirus vector, adenoviral vector, or a retrovirus vector.

[0113] In some embodiments, the vector further comprises a promoter, e.g., wherein the promoter is chosen from an EF-1 promoter, a CMV IE gene promoter, an EF-1α promoter, an ubiquitin C promoter, or a phosphoglycerate kinase (PGK) promoter.

[0114] In some embodiments, the vector is an in vitro transcribed vector, or the vector further comprises a poly(A) tail or a 3′UTR.

### Immune Effector Cells

[0115] In another aspect, the invention pertains to an immune effector cell (e.g., a population of immune effector cells) comprising a CAR molecule, e.g., a CAR polypeptide, as described herein, and an SHP inhibitor molecule, e.g., an SHP inhibitor polypeptide, as described herein.

[0116] In another aspect, the invention pertains to an immune effector cell (e.g., a population of immune effector cells) comprising
[0117] (a) a CAR molecule, e.g., a CAR polypeptide and
[0118] (b) an SHP inhibitor molecule, e.g., SHP polypeptide, wherein said SHP inhibitor polypeptide comprises:
   [0119] (i) a mutation (e.g., one or more deletions or substitutions) in the ITIM-binding region (e.g., an SH2 domain, e.g., the N-terminal SH2 domain) of the SHP inhibitor polypeptide, and
   [0120] (ii) a mutation (e.g., one or more deletions or substitutions) in a catalytic domain e.g., the phosphatase domain.

[0121] In another aspect, the invention pertains to an immune effector cell (e.g., a population of immune effector cells), comprising
[0122] a nucleic acid composition described herein;
[0123] a vector described herein; or
[0124] a polypeptide described herein.

[0125] In some embodiments of any of the aforesaid immune effector cells, the immune effector cell is a human T cell (e.g., CD8+ T cell or CD4+ T cell) or a human NK cell, optionally, wherein the T cell is diacylglycerol kinase (DGK) and/or Ikaros deficient.

[0126] In some embodiments, the immune effector cell is derived from blood, cord blood, bone marrow, or iPSC.

[0127] In some embodiments, the immune effector cell comprises an immune checkpoint inhibitor, e.g., a receptor. In some embodiments, the checkpoint inhibitor is chosen from PD-1, PD-L1, LAG-3, TIM3, B7-H1, CD160, P1H, 2B4, CEACAM (e.g., CEACAM-1, CEACAM-3, and/or CEACAM-5), TIGIT, CTLA-4, BTLA, or LAIR1. In one embodiment, the checkpoint inhibitor is PD-1.

### Methods of Making and Using

[0128] In another aspect, the invention pertains to a method of making a CAR-expressing immune effector cell (e.g., a population of CAR-expressing immune effector cells), comprising introducing the nucleic acid composition described herein or a vector described herein, into an immune effector cell, under conditions such that the CAR polypeptide is expressed.

[0129] In some embodiments, the method of making a CAR-expressing immune effector cell further comprises:
[0130] (a) providing a population of immune effector cells (e.g., T cells or NK cells); and
[0131] (b) removing T regulatory cells from the population, thereby providing a population of T regulatory-depleted cells;
[0132] wherein steps (a) and (b) are performed prior to introducing the nucleic acid composition to the population.

[0133] In some embodiments, the T regulatory cells are removed from the cell population using an anti-CD25 antibody, or an anti-GITR antibody.

[0134] In another aspect, the invention pertains to a method of providing anti-tumor or anti-cancer cell, immunity in a subject comprising administering to the subject an effective amount of an immune effector cell described herein, e.g., wherein the cell is an autologous T cell or an allogeneic T cell, or an autologous NK cell or an allogeneic NK cell.

[0135] In another aspect, the invention pertains to a method of treating a subject having a disease (e.g., cancer) associated with expression of a tumor antigen. The method includes administering an effective amount of an SHP inhibitor, e.g., an SHP inhibitor molecule in an immune effector cell as described herein, to the subject, thereby treating the subject.

[0136] In some embodiments, the SHP inhibitor is sodium stibogluconate (SSG).

[0137] In other embodiments, the SHP inhibitor is an SHP molecule, e.g., SHP polypeptide, as described herein, in an immune effector cell, e.g., a CAR-expressing immune effector cells as described herein.

[0138] In some embodiments, the cancer cells comprise an immune checkpoint inhibitor, e.g., a ligand. In some embodiments, the checkpoint inhibitor is chosen from PD-1, PD-L1, LAG-3, TIM3, B7-H1, CD160, P1H, 2B4, CEACAM (e.g., CEACAM-1, CEACAM-3, and/or CEACAM-5), TIGIT, CTLA-4, BTLA, or LAIR1. In one embodiment, the checkpoint inhibitor is PD-L1.

[0139] In some embodiments, the method further comprises administering an agent that increases the efficacy of the immune effector cell, thereby treating the subject.

[0140] In some embodiments, said agent is chosen from one or more of a protein phosphatase inhibitor;
[0141] a kinase inhibitor;
[0142] a cytokine;
[0143] an inhibitor of an immune inhibitory molecule; or
[0144] an agent that decreases the level or activity of a TREG cell.

[0145] In some embodiments, the disease associated with expression of the tumor antigen is selected from the group consisting of a proliferative disease, a precancerous condition, a cancer, and a non-cancer related indication associated with expression of the tumor antigen.

[0146] In some embodiments, the disease associated with expression of the tumor antigen is a solid tumor.

[0147] In some embodiments, the cancer is selected from the group consisting of colon cancer, rectal cancer, renal-cell carcinoma, liver cancer, non-small cell carcinoma of the lung, cancer of the small intestine, cancer of the esophagus, melanoma, bone cancer, pancreatic cancer, skin cancer, cancer of the head or neck, cutaneous or intraocular malignant melanoma, uterine cancer, ovarian cancer, rectal cancer, cancer of the anal region, stomach cancer, testicular cancer, uterine cancer, carcinoma of the fallopian tubes, carcinoma of the endometrium, carcinoma of the cervix, carcinoma of the vagina, carcinoma of the vulva, Hodgkin lymphoma, non-Hodgkin lymphoma, cancer of the endocrine system, cancer of the thyroid gland, cancer of the parathyroid gland, cancer of the adrenal gland, sarcoma of soft tissue, cancer of the urethra, cancer of the penis, solid tumors of childhood, cancer of the bladder, cancer of the kidney or ureter, carcinoma of the renal pelvis, neoplasm of the central nervous system (CNS), primary CNS lymphoma, tumor angiogenesis, spinal axis tumor, brain stem glioma, pituitary adenoma, Kaposi's sarcoma, epidermoid cancer, squamous cell cancer, T-cell lymphoma, environmentally induced cancers, combinations of said cancers, and metastatic lesions of said cancers.

[0148] In some embodiments, the cancer is a hematologic cancer chosen from one or more of chronic lymphocytic leukemia (CLL), acute leukemias, acute lymphoid leukemia (ALL), B-cell acute lymphoid leukemia (B-ALL), T-cell acute lymphoid leukemia (T-ALL), chronic myelogenous leukemia (CML), B cell prolymphocytic leukemia, blastic plasmacytoid dendritic cell neoplasm, Burkitt's lymphoma, diffuse large B cell lymphoma, follicular lymphoma, hairy cell leukemia, small cell- or a large cell-follicular lymphoma, malignant lymphoproliferative conditions, MALT lymphoma, mantle cell lymphoma, marginal zone lymphoma, multiple myeloma, myelodysplasia and myelodysplastic syndrome, non-Hodgkin lymphoma, Hodgkin lymphoma, plasmablastic lymphoma, plasmacytoid dendritic cell neoplasm, Waldenstrom macroglobulinemia, or pre-leukemia.

[0149] In another aspect, the invention pertains to a nucleic acid composition described herein, a vector described herein, a polypeptide described herein, or an immune effector cell described herein, for use as a medicament.

[0150] In another aspect, the invention pertains to a nucleic acid composition described herein, a vector described herein, a polypeptide described herein, or an immune effector cell described herein, for use in the treatment of a disease expressing a tumor antigen.

[0151] In one aspect, disclosed herein is a composition comprising:
[0152] (a) a nucleic acid molecule encoding a chimeric antigen receptor (CAR) polypeptide and
[0153] (b) an SHP inhibitor, wherein the SHP inhibitor is chosen from:
   [0154] (i) one or more components of a gene editing system targeting one or more sites within a gene encoding SHP (e.g., SHP1 or SHP2) or a regulatory element thereof, a nucleic acid molecule encoding the one or more components of the gene editing system, or a combination thereof, or
   [0155] (2) an agent that has RNAi or antisense inhibition activity against SHP (e.g., SHP1 or SHP2), or a nucleic acid molecule encoding the agent.

[0156] In some embodiments, the SHP inhibitor is one or more components of a gene editing system targeting one or more sites within a gene encoding SHP (e.g., SHP1 or SHP2) or a regulatory element thereof, a nucleic acid molecule encoding the one or more components of the gene editing system, or a combination thereof. In some embodiments, the gene editing system is chosen from a CRISPR/Cas9 system, a zinc finger nuclease system, a TALEN system, or a meganuclease system. In some embodiments, the gene editing system is a CRISPR/Cas9 system. In some embodiments, the gene editing system is a zinc finger nuclease system. In some embodiments, the gene editing system is a TALEN system. In some embodiments, the gene editing system is a meganuclease system.

[0157] In some embodiments, the SHP inhibitor comprises a guide RNA (gRNA) molecule targeting a gene encoding SHP (e.g., SHP1 or SHP2) or a regulatory element thereof. In some embodiments, the SHP inhibitor comprises a gRNA molecule targeting an exon of the gene encoding SHP (e.g., SHP1 or SHP2).

[0158] In some embodiments, the SHP inhibitor is an SHP2 inhibitor. In some embodiments, the SHP2 inhibitor comprises a gRNA molecule targeting any genomic location provided in column 4 of Table 19. In some embodiments, the SHP2 inhibitor comprises a gRNA molecule targeting any genomic target sequence provided in column 6 of Table 19, or a portion thereof.

[0159] In some embodiments, the SHP inhibitor is an SHP2 inhibitor, wherein the SHP2 inhibitor comprises a gRNA molecule comprising a tracr and a crRNA. In some embodiments, the crRNA comprises a targeting domain that is complementary with a target sequence of SHP2. In some embodiments, the targeting domain comprises any nucleotide sequence provided in column 5 of Table 19. In some embodiments, the targeting domain comprises or consists of 17, 18, 19, 20, 21, 22, 23, or 24 consecutive nucleic acids of any nucleotide sequence provided in column 5 of Table 19. In some embodiments, the 17, 18, 19, 20, 21, 22, 23, or 24 consecutive nucleic acids of any nucleotide sequence provided in column 5 of Table 19 are the 17, 18, 19, 20, 21, 22, 23, or 24 consecutive nucleic acids disposed at the 3′ end of the recited nucleotide sequence provided in column 5 of Table 19. In some embodiments, the 17, 18, 19, 20, 21, 22, 23, or 24 consecutive nucleic acids of any nucleotide sequence provided in column 5 of Table 19 are the 17, 18, 19, 20, 21, 22, 23, or 24 consecutive nucleic acids disposed at the 5′ end of the recited nucleotide sequence provided in column 5 of Table 19. In some embodiments, the 17, 18, 19, 20, 21, 22, 23, or 24 consecutive nucleic acids of any nucleotide sequence provided in column 5 of Table 19 do not comprise either the 5′ or 3′ nucleic acid of the recited nucleotide sequence provided in column 5 of Table 19.

[0160] In some embodiments, the SHP inhibitor is an agent that has RNAi or antisense inhibition activity against SHP (e.g., SHP1 or SHP2), or a nucleic acid molecule encoding the agent. In some embodiments, the SHP inhibitor is an agent that mediates RNA interference, e.g., an siRNA or shRNA specific for a gene encoding SHP (e.g., SHP1 or SHP2), or a nucleic acid molecule encoding the siRNA or shRNA.

[0161] In some embodiments, the encoded CAR polypeptide comprises an antigen binding domain, a transmembrane domain, and an intracellular signalling domain. In some embodiments, the intracellular domain comprises a primary signaling domain, a costimulatory domain, or both of a primary signaling domain and a costimulatory domain. In some embodiments, the primary signaling domain comprises a functional signaling domain of one or more proteins selected from the group consisting of CD3 zeta, CD3 gamma, CD3 delta, CD3 epsilon, common FcR gamma (FCER1G), FcR beta (Fc Epsilon Rib), CD79a, CD79b, Fcgamma RIIa, DAP10, and DAP12, or a functional variant thereof. In some embodiments, the costimulatory domain comprises a functional domain of one or more proteins selected from the group consisting of CD27, CD28, 4-1BB (CD137), OX40, CD28-OX40, CD28-4-1BB, CD30, CD40, PD-1, ICOS, lymphocyte function-associated antigen-1 (LFA-1), CD2, CD7, LIGHT, NKG2C, B7-H3, a ligand that specifically binds with CD83, CDS, ICAM-1, GITR, BAFFR, HVEM (LIGHTR), SLAMF7, NKp80 (KLRF1), CD160, CD19, CD4, CD8alpha, CD8beta, IL2R beta, IL2R gamma, IL7R alpha, ITGA4, VLA1, CD49a, ITGA4, IA4, CD49D, ITGA6, VLA-6, CD49f, ITGAD, CD11d, ITGAE, CD103, ITGAL, CD11a, LFA-1, ITGAM, CD11b, ITGAX, CD11c, ITGB1, CD29, ITGB2, CD18, LFA-1, ITGB7, TNFR2, TRANCE/RANKL, DNAM1 (CD226), SLAMF4 (CD244, 2B4), CD84, CD96 (Tactile), CEACAM1, CRTAM, Ly9 (CD229), CD160 (BY55), PSGL1, CD100 (SEMA4D), CD69, SLAMF6 (NTB-A, Ly108), SLAM (SLAMF1, CD150, IPO-3), BLAME (SLAMF8), SELPLG (CD162), LTBR, LAT, GADS, SLP-76, PAG/Cbp, NKp44, NKp30, NKp46, and NKG2D, or a functional fragment thereof.

[0162] In some embodiments, the antigen binding domain binds a tumor antigen. In some embodiments, the tumor antigen is selected from the group consisting of: CD19; CD123; CD22; CD30; CD171; CS-1 (also referred to as CD2 subset 1, CRACC, SLAMF7, CD319, and 19A24); C-type lectin-like molecule-1 (CLL-1 or CLECL1); CD33; epidermal growth factor receptor variant III (EGFRvIII); ganglioside G2 (GD2); ganglioside GD3 (aNeu5Ac(2-8)aNeu5Ac(2-3)bDGalp(1-4)bDGlcp(1-1)Cer); TNF receptor family member B cell maturation (BCMA); Tn antigen ((Tn Ag) or (GalNAca-Ser/Thr)); prostate-specific membrane antigen (PSMA); Receptor tyrosine kinase-like orphan receptor 1 (ROR1); Fms-Like Tyrosine Kinase 3 (FLT3); Tumor-associated glycoprotein 72 (TAG72); CD38; CD44v6; Carcinoembryonic antigen (CEA); Epithelial cell adhesion molecule (EPCAM); B7H3 (CD276); KIT (CD117); Interleukin-13 receptor subunit alpha-2 (IL-13Ra2 or CD213A2); Mesothelin; Interleukin 11 receptor alpha (IL-11Ra); prostate stem cell antigen (PSCA); Protease Serine 21 (Testisin or PRSS21); vascular endothelial growth factor receptor 2 (VEGFR2); Lewis(Y) antigen; CD24; Platelet-derived growth factor receptor beta (PDGFR-beta); Stage-specific embryonic antigen-4 (SSEA-4); CD20; Folate receptor alpha; Receptor tyrosine-protein kinase ERBB2 (Her2/neu); Mucin 1, cell surface associated (MUC1); epidermal growth factor receptor (EGFR); neural cell adhesion molecule (NCAM); Prostase; prostatic acid phosphatase (PAP); elongation factor 2 mutated (ELF2M); Ephrin B2; fibroblast activation protein alpha (FAP); insulin-like growth factor 1 receptor (IGF-I receptor), carbonic anhydrase IX (CAIX); Proteasome (Prosome, Macropain) Subunit, Beta Type, 9 (LMP2); glycoprotein 100 (gp100); oncogene fusion protein consisting of breakpoint cluster region (BCR) and Abelson murine leukemia viral oncogene homolog 1 (Abl) (bcr-abl); tyrosinase; ephrin type-A receptor 2 (EphA2); Fucosyl GM1; sialyl Lewis adhesion molecule (sLe); ganglioside GM3 (aNeu5Ac(2-3)bDGalp(1-4)bDGlcp(1-1)Cer); transglutaminase 5 (TGS5); high molecular weight-melanoma-associated antigen (HMWMAA); o-acetyl-GD2 ganglioside (OAcGD2); Folate receptor beta; tumor endothelial marker 1 (TEM1/CD248); tumor endothelial marker 7-related (TEM7R); claudin 6 (CLDN6); thyroid stimulating hormone receptor (TSHR); G protein-coupled receptor class C group 5, member D (GPRC5D); chromosome X open reading frame 61 (CXORF61); CD97; CD179a; anaplastic lymphoma kinase (ALK); Polysialic acid; placenta-specific 1 (PLAC1); hexasaccharide portion of globoH glycoceramide (GloboH); mammary gland differentiation antigen (NY—BR-1); uroplakin 2 (UPK2); Hepatitis A virus cellular receptor 1 (HAVCR1); adrenoceptor beta 3 (ADRB3); pannexin 3 (PANX3); G protein-coupled receptor 20 (GPR20); lymphocyte antigen 6 complex, locus K 9 (LY6K); Olfactory receptor 51E2 (OR51E2); TCR Gamma Alternate Reading Frame Protein (TARP); Wilms tumor protein (WT1); Cancer/testis antigen 1 (NY-ESO-1); Cancer/testis antigen 2 (LAGE-1a); Melanoma-associated antigen 1 (MAGE-A1); ETS translocation-variant gene 6, located on chromosome 12p (ETV6-AML); sperm protein 17 (SPA17); X Antigen Family, Member 1A (XAGE1); angiopoietin-binding cell surface receptor 2 (Tie 2); melanoma cancer testis antigen-1 (MAD-CT-1); melanoma cancer testis antigen-2 (MAD-CT-2); Fos-related antigen 1; tumor protein p53 (p53); p53 mutant; prostein; survivin; telomerase; prostate carcinoma tumor antigen-1 (PCTA-1 or Galectin 8), melanoma antigen recognized by T cells 1 (MelanA or MART1); Rat sarcoma (Ras) mutant; human Telomerase reverse transcriptase (hTERT); sarcoma translocation breakpoints; melanoma inhibitor of apoptosis (ML-IAP); ERG (transmembrane protease, serine 2 (TMPRSS2) ETS fusion gene); N-Acetyl glucosaminyl-transferase V (NA17); paired box protein Pax-3 (PAX3); Androgen receptor; Cyclin B1; v-myc avian myelocytomatosis viral oncogene neuroblastoma derived homolog (MYCN); Ras Homolog Family Member C (RhoC); Tyrosinase-related protein 2 (TRP-2); Cytochrome P450 1B1 (CYP1B1); CCCTC-Binding Factor (Zinc Finger Protein)-Like (BORIS or Brother of the Regulator of Imprinted Sites), Squamous Cell Carcinoma Antigen Recognized By T Cells 3 (SART3); Paired box protein Pax-5 (PAX5); proacrosin binding protein sp32 (OY-TES1); lymphocyte-specific protein tyrosine kinase (LCK); A kinase anchor protein 4 (AKAP-4); synovial sarcoma, X breakpoint 2 (SSX2); Receptor for Advanced Glycation Endproducts (RAGE-1); renal ubiquitous 1 (RU1); renal ubiquitous 2 (RU2); legumain; human papilloma virus E6 (HPV E6); human papilloma virus E7 (HPV E7); intestinal carboxyl esterase; heat shock protein 70-2 mutated (mut hsp70-2); CD79a; CD79b; CD72; Leukocyte-associated immunoglobulin-like receptor 1 (LAIR1); Fc fragment of IgA receptor (FCAR or CD89); Leukocyte immunoglobulin-like receptor subfamily A member 2 (LILRA2); CD300 molecule-like family member f (CD300LF); C-type lectin domain family 12 member A (CLEC12A); bone marrow stromal cell antigen 2 (BST2); EGF-like module-containing mucin-like hormone receptor-like 2 (EMR2); lymphocyte antigen 75 (LY75); Glypican-3 (GPC3); Fc receptor-like 5 (FCRL5); and immunoglobulin lambda-like polypeptide 1 (IGLL1). In some embodiments, the tumor antigen is selected from CD150, 5T4, ActRIIA, B7, BMCA, CA-125, CCNA1, CD123, CD126, CD138, CD14, CD148, CD15, CD19, CD20, CD200, CD21, CD22, CD23, CD24, CD25, CD26, CD261, CD262, CD30, CD33, CD362, CD37, CD38, CD4, CD40, CD40L, CD44, CD46, CD5, CD52, CD53, CD54, CD56, CD66a-d, CD74, CD8, CD80, CD92, CE7, CS-1, CSPG4, ED-B fibronectin, EGFR, EGFRvIII, EGP-2, EGP-4, EPHa2, ErbB2, ErbB3, ErbB4, FBP, GD2, GD3, HER1-HER2 in combination, HER2-HER3 in combination, HERV-K, HIV-1 envelope glycoprotein gp120, HIV-1 envelope glycoprotein gp41, HLA-DR, HM1.24, HMW-MAA, Her2, Her2/neu, IGF-1R, IL-11Ralpha, IL-13R-alpha2, IL-2, IL-22R-alpha, IL-6, IL-6R, Ia, Ii, L1-CAM, L1-cell adhesion molecule, Lewis Y, L1-CAM, MAGE A3, MAGE-A1, MART-1, MUC1, NKG2C ligands, NKG2D Ligands, NY-ESO-1, OEPHa2, PIGF, PSCA, PSMA, ROR1, T101, TAC, TAG72, TIM-3, TRAIL-R1, TRAIL-R1 (DR4), TRAIL-R2 (DR5), VEGF, VEGFR2, WT-1, a G-protein coupled receptor, alphafetoprotein (AFP), an angiogenesis factor, an exogenous cognate binding molecule (ExoCBM), oncogene product, anti-folate receptor, c-Met, carcinoembryonic antigen (CEA), cyclin (D1), ephrinB2, epithelial tumor antigen, estrogen receptor, fetal acethycholine e receptor, folate binding protein, gp100, hepatitis B surface antigen, kappa chain, kappa light chain, kdr, lambda chain, livin, melanoma-associated antigen, mesothelin, mouse double minute 2 homolog (MDM2), mucin 16 (MUC16), mutated p53, mutated ras, necrosis antigens, oncofetal antigen, ROR2, progesterone receptor, prostate specific antigen, tEGFR, tenascin, 02-Microglobulin, Fc Receptor-like 5 (FcRL5), or molecules expressed by HIV, HCV, HBV, or other pathogens. In some embodiments, the tumor antigen is a solid tumor antigen, e.g., mesothelin. In some embodiments, the tumor antigen is expressed in a solid tumor that also expresses an immune checkpoint inhibitor, e.g., PD-L1.

[0163] In some embodiments, the antigen binding domain comprises an antibody, an antibody fragment, an scFv, a Fv, a Fab, a (Fab′)2, a single domain antibody (SDAB), a VH or VL domain, or a camelid VHH domain.

[0164] In some embodiments, wherein the transmembrane domain comprises a transmembrane domain of a protein selected from the group consisting of the alpha, beta or zeta chain of the T-cell receptor, CD28, CD3 epsilon, CD45, CD4, CD5, CD8, CD9, CD16, CD22, CD33, CD37, CD64, CD80, CD86, CD134, CD137, CD154, KIRDS2, OX40, CD2, CD27, LFA-1 (CD11a, CD18), ICOS (CD278), 4-1BB (CD137), GITR, CD40, BAFFR, HVEM (LIGHTR), SLAMF7, NKp80 (KLRF1), CD160, CD19, IL2R beta, IL2R gamma, IL7R α, ITGA1, VLA1, CD49a, ITGA4, IA4, CD49D, ITGA6, VLA-6, CD49f, ITGAD, CD11d, ITGAE, CD103, ITGAL, CD11a, LFA-1, ITGAM, CD11b, ITGAX, CD11c, ITGB1, CD29, ITGB2, CD18, LFA-1, ITGB7, TNFR2, DNAM1 (CD226), SLAMF4 (CD244, 2B4), CD84, CD96 (Tactile), CEACAM1, CRTAM, Ly9 (CD229), CD160 (BY55), PSGL1, CD100 (SEMA4D), SLAMF6 (NTB-A, Ly108), SLAM (SLAMF1, CD150, IPO-3), BLAME (SLAMF8), SELPLG (CD162), LTBR, PAG/Cbp, NKp44, NKp30, NKp46, NKG2D, and NKG2C, or a functional variant thereof.

[0165] In some embodiments, the antigen binding domain is connected to the transmembrane domain by a hinge region.

[0166] In some embodiments, the composition further encodes a leader sequence.

[0167] In some embodiments, the composition comprises:
[0168] (a) a nucleic acid molecule encoding a chimeric antigen receptor (CAR) polypeptide,
[0169] (b) an SHP1 inhibitor, wherein the SHP1 inhibitor is chosen from:
   [0170] (i) one or more components of a gene editing system targeting one or more sites within a gene encoding SHP1 or a regulatory element thereof, a nucleic acid molecule encoding the one or more components of the gene editing system, or a combination thereof, or
   [0171] (2) an agent that has RNAi or antisense inhibition activity against SHP1, or a nucleic acid molecule encoding the agent, and
[0172] (c) an SHP2 inhibitor, wherein the SHP2 inhibitor is chosen from:
   [0173] (i) one or more components of a gene editing system targeting one or more sites within a gene encoding SHP2 or a regulatory element thereof, a nucleic acid molecule encoding the one or more components of the gene editing system, or a combination thereof, or
   [0174] (2) an agent that has RNAi or antisense inhibition activity against SHP2, or a nucleic acid molecule encoding the agent.

[0175] In some embodiments, the composition is DNA or RNA.

[0176] In some embodiments, the SHP inhibitor comprises:
[0177] (i) a nucleic acid molecule encoding the one or more components of the gene editing system targeting one or more sites within a gene encoding SHP (e.g., SHP1 or SHP2) or a regulatory element thereof, or
[0178] (ii) a nucleic acid molecule encoding the agent having RNAi or antisense inhibition activity against SHP (e.g., SHP1 or SHP2). In some embodiments, the nucleic acid molecule encoding the CAR polypeptide, the nucleic acid molecule encoding the one or more components of the gene editing system, and the nucleic acid molecule encoding the agent having RNAi or antisense inhibition activity are disposed on a single nucleic acid molecule. In some embodiments, the nucleic acid molecule encoding the CAR polypeptide, the nucleic acid molecule encoding the one or more components of the gene editing system, and the nucleic acid molecule encoding the agent having RNAi or antisense inhibition activity are disposed on separate nucleic acid molecules.

[0179] In one aspect, disclosed herein is a vector comprising any of the aforementioned compositions.

[0180] In one aspect, disclosed herein is a cell (e.g., a population of immune effector cells) comprising any of the aforementioned compositions or vectors. In some embodiments, the cell is chosen from a human T cell (e.g., CD8+ T cell or CD4+ T cell) or a human NK cell.

[0181] In one aspect, disclosed herein is a method of making a CAR-expressing cell (e.g., a population of CAR-expressing immune effector cells), comprising culturing any of the aforementioned cells under conditions such that the CAR polypeptide is expressed.

[0182] In one aspect, disclosed herein is a method of providing anti-tumor immunity in a subject, comprising administering to the subject an effective amount of any of the aforementioned cells. In some embodiments, the cell is an autologous T cell or an allogeneic T cell, or an autologous NK cell or an allogeneic NK cell.

[0183] In one aspect, disclosed herein is a method of treating cancer in a subject in need thereof, comprising administering to the subject an effective amount of any of the aforementioned cells, thereby treating the subject. In some embodiments, the cancer is selected from the group consisting of colon cancer, rectal cancer, renal-cell carcinoma, liver cancer, non-small cell carcinoma of the lung, cancer of the small intestine, cancer of the esophagus, melanoma, bone cancer, pancreatic cancer, skin cancer, cancer of the head or neck, cutaneous or intraocular malignant melanoma, uterine cancer, ovarian cancer, rectal cancer, cancer of the anal region, stomach cancer, testicular cancer, uterine cancer, carcinoma of the fallopian tubes, carcinoma of the endometrium, carcinoma of the cervix, carcinoma of the vagina, carcinoma of the vulva, Hodgkin's Disease, non-Hodgkin lymphoma, cancer of the endocrine system, cancer of the thyroid gland, cancer of the parathyroid gland, cancer of the adrenal gland, sarcoma of soft tissue, cancer of the urethra, cancer of the penis, solid tumors of childhood, cancer of the bladder, cancer of the kidney or ureter, carcinoma of the renal pelvis, neoplasm of the central nervous system (CNS), primary CNS lymphoma, tumor angiogenesis, spinal axis tumor, brain stem glioma, pituitary adenoma, Kaposi's sarcoma, epidermoid cancer, squamous cell cancer, T-cell lymphoma, environmentally induced cancers, combinations of said cancers, and metastatic lesions of said cancers. In some embodiments, the cancer is a hematologic cancer chosen from one or more of chronic lymphocytic leukemia (CLL), acute leukemias, acute lymphoid leukemia (ALL), B-cell acute lymphoid leukemia (B-ALL), T-cell acute lymphoid leukemia (T-ALL), chronic myelogenous leukemia (CML), B cell prolymphocytic leukemia, blastic plasmacytoid dendritic cell neoplasm, Burkitt's lymphoma, diffuse large B cell lymphoma, follicular lymphoma, hairy cell leukemia, small cell- or a large cell-follicular lymphoma, malignant lymphoproliferative conditions, MALT lymphoma, mantle cell lymphoma, marginal zone lymphoma, multiple myeloma, myelodysplasia and myelodysplastic syndrome, non-Hodgkin's lymphoma, Hodgkin's lymphoma, plasmablastic lymphoma, plasmacytoid dendritic cell neoplasm, Waldenstrom macroglobulinemia, or pre-leukemia.

[0184] Unless otherwise defined, all technical and scientific terms used herein have the same meaning as commonly understood by one of ordinary skill in the art to which this invention belongs. Although methods and materials similar or equivalent to those described herein can be used in the practice or testing of the present invention, suitable methods and materials are described below. All publications, patent applications, patents, and other references mentioned herein are incorporated by reference in their entirety. In addition, the materials, methods, and examples are illustrative only and not intended to be limiting.

[0185] Other features and advantages of the invention will be apparent from the detailed description, drawings, and from the claims.

### BRIEF DESCRIPTION OF THE DRAWINGS

[0186] FIG. 1 shows a diagram of examples of inhibitory receptors (IRs) involved in immunosuppression of CAR T cells.

[0187] FIG. 2 shows a diagram of TCR signaling, highlighting the role of SHP1.

[0188] FIG. 3 shows graphs of tumor cell killing (top) and IFNg secretion (bottom) of anti-mesothelin CAR TIL cells recovered after CAR T cells were injected into NSG flank tumors; recovered TIL cells were treated or not treated with SSG. “cryo mesoCAR” represents T cells that were not injected but cryopreserved, “mesoCAR TIL” represents T cells that were injected, then isolated from flank tumors at the experiment endpoint.

[0189] FIG. 4 shows a graph of phosphatase activity of SHP1 WT, C453S, and R459M.

[0190] FIG. 5 shows a graph of tumor cell killing by CAR T cells transfected with mRNA encoding anti-mesothelin CAR and no SHP1, WT SHP1, C453S SHP1, or R459M SHP1.

[0191] FIG. 6 shows a graph of T cell proliferation after viral transduction of SHP1-targeting shRNA and anti-CD3/28 bead activation.

[0192] FIG. 7 shows a diagram of SHP1 activation and depicts the roles of the N—SH2 domain and ITIMs.

[0193] FIG. 8 shows the amino acid sequences of SH2-N(SEQ ID NO: 40) and SH2-N—R30K (SEQ ID NO: 41).

[0194] FIG. 9 shows a diagram of lentiviral vectors comprising SS1BBz CAR and either SH2-N SHP1 or SH2-N—R30K SHP1.

[0195] FIG. 10 shows a flow cytometry data showing cytokine secretion upon stimulation with plate-bound CD3 of CD8+ T cells transduced with CAR, CAR and SH2-N SHP1, or CAR and SH2-N—R30K SHP1. The Y-axes in 1st column is IL2 expression, in 2nd column TNFa, and 3rd column IFNg; X-axes for all dot-plots are PD1 expression.

[0196] FIG. 11 shows graphs of EMMESO (top) or EMMESO-PDL1 (bottom) cell killing by T cells transduced with CAR, CAR and SH2-N SHP1, or CAR and SH2-N—R30K SHP1.

[0197] FIG. 12 shows caliper measurements of flank tumor size after mice were injected with NTD T cells, NTD T cells and SSG, CAR T cells, CAR T cells and SSG, CAR SH2-N T cells, or CAR SH2-N—R30K T cells.

[0198] FIG. 13 shows a graph of TIL infiltration of tumors after injection with CAR T cells, CAR T cells and SSG, CAR SH2-N T cells, or CAR SH2-N—R30K T cells, measured using flow cytometry (% represents CD3+ events within viable, singlet gate).

[0199] FIG. 14 shows graphs of the frequency of PD1 expression (top) or TIM3/CEACAM1 expression (bottom) in TILs recovered from tumors injected with CAR T cells, CAR T cells and SSG, CAR SH2-N T cells, or CAR SH2-N—R30K T cells, measured using flow cytometry.

[0200] FIG. 15 shows graphs of EMMESO (top) or EMMESO-PDL1 (bottom) cell killing by CAR T cells, or TILs recovered from tumors injected with CAR T cells, CAR T cells and SSG, CAR SH2-N T cells, or CAR SH2-N—R30K T cells at various E:T ratios.

[0201] FIGS. 16A and 16B show graphs of the percentage of pZap70 positive T cells when CARGFP cells, dnSHP1 CAR cells, dnSHP2 CAR cells, or dnSHP1&2 CAR cells were co-cultured with EMMESO tumor cells (FIG. 16A) or EMMESO-PD-L1 tumor cells (FIG. 16B). Gating was on live, singlet, CAR positive T cells.

[0202] FIG. 17 shows flow cytometry plots of CARGFP cells, dnSHP1 CAR cells, dnSHP2 CAR cells, or dnSHP1&2 CAR cells that were stained for CD8 and IFNγ or IL2.

### DETAILED DESCRIPTION

[0203] Compositions and uses that improve an activity (e.g., one or more of function, persistence, cancer killing effect, or tumor infiltration) of an immune effector cell, e.g., a population of immune effector cells (e.g., T cells, NK cells) are disclosed. In some embodiments, the immune effector cell expresses a Chimeric Antigen Receptor molecule (e.g., a CAR polypeptide) that binds to a tumor antigen. In some embodiments, the immune effector cell comprises, or is contacted with an inhibitor of a Src homology region 2 domain-containing phosphatase (SHP). In one embodiment, the inhibitor is an inhibitor of SHP-1. In another embodiment, the inhibitor is an inhibitor of SHP-2. In one embodiment, the SHP inhibitor interferes with SHP signaling (e.g., interferes with SHP-1 signaling or SHP-2 signaling, or both), also referred to herein as an SHP inhibitor molecule (e.g., an SHP inhibitor polypeptide). In general, the invention features, at least in part, immune cells, e.g., T-cells, containing a CAR molecule and an SHP inhibitor molecule, e.g., an SHP inhibitor polypeptide. The invention is based, at least in part, on the discovery that immune effector cells comprising one or more SHP inhibitor polypeptides result in one or more of: increased killing of tumor cells, increased cytokine release, and increased tumor infiltration in vitro and in vivo.

[0204] Without wishing to be bound by theory, SHP1 (and SHP2) regulates T cell receptor signaling, and is activated by inhibitory receptors (IRs). IR signaling down-regulates T cell function, lowering the efficacy of CAR T cell therapies in targeting and killing tumor cells. SHP inhibition is expected to interfere with the signaling of immunosuppressive factors, such as IRs, or checkpoint molecules. In certain embodiments, the IRs are present in the microenvironment of a tumor, e.g., a solid tumor, thus resulting in decreased effectiveness of a therapy, e.g., a CAR therapy, in the tumor microenvironment. SHP inhibitor molecules, e.g., polypeptides that inhibit SHP1 and/or SHP2, and, when co-expressed with a CAR in an immune effector cell, result in one or more of: increase killing of tumor cells, increase cytokine release, and increase tumor infiltration in vitro and in vivo. The SHP inhibitor molecules disclosed herein are compatible with a wide array of CARs, also described herein.

### Definitions

[0205] Unless defined otherwise, all technical and scientific terms used herein have the same meaning as commonly understood by one of ordinary skill in the art to which the invention pertains.

[0206] The term “a” and “an” refers to one or to more than one (i.e., to at least one) of the grammatical object of the article. By way of example, “an element” means one element or more than one element.

[0207] The term “about” when referring to a measurable value such as an amount, a temporal duration, and the like, is meant to encompass variations of 20% or in some instances ±10%, or in some instances ±5%, or in some instances 1%, or in some instances ±0.1% from the specified value, as such variations are appropriate to perform the disclosed methods.

[0208] The term “Chimeric Antigen Receptor” or alternatively a “CAR” refers to a set of polypeptides, typically two in the simplest embodiments, which when in an immune effector cell, provides the cell with specificity for a target cell, typically a cancer cell, and with intracellular signal generation. The terms “CAR” and “CAR molecule” are used interchangeably. In some embodiments, a CAR comprises at least an extracellular antigen binding domain, a transmembrane domain and a cytoplasmic signaling domain (also referred to herein as “an intracellular signaling domain”) comprising a functional signaling domain derived from a stimulatory molecule and/or costimulatory molecule as defined below. In some embodiments, the set of polypeptides are in the same polypeptide chain (e.g., comprise a chimeric fusion protein). In some aspects, the set of polypeptides are contiguous with each other. In some embodiments, the set of polypeptides are not contiguous with each other, e.g., are in different polypeptide chains. In some embodiments, the set of polypeptides include a dimerization switch that, upon the presence of a dimerization molecule, can couple the polypeptides to one another, e.g., can couple an antigen binding domain to an intracellular signaling domain. In one aspect, the stimulatory molecule is the zeta chain associated with the T cell receptor complex. In one aspect, the cytoplasmic signaling domain further comprises one or more functional signaling domains derived from at least one costimulatory molecule as defined below. In one aspect, the costimulatory molecule is chosen from the costimulatory molecules described herein, e.g., 4-1BB (i.e., CD137), CD27 and/or CD28. In one aspect, the CAR comprises a chimeric fusion protein comprising an extracellular antigen binding domain, a transmembrane domain and an intracellular signaling domain comprising a functional signaling domain derived from a stimulatory molecule. In one aspect, the CAR comprises a chimeric fusion protein comprising an extracellular antigen binding domain, a transmembrane domain and an intracellular signaling domain comprising a functional signaling domain derived from a costimulatory molecule and a functional signaling domain derived from a stimulatory molecule. In one aspect, the CAR comprises a chimeric fusion protein comprising an extracellular antigen binding domain, a transmembrane domain and an intracellular signaling domain comprising two functional signaling domains derived from one or more costimulatory molecule(s) and a functional signaling domain derived from a stimulatory molecule. In one aspect, the CAR comprises a chimeric fusion protein comprising an extracellular antigen binding domain, a transmembrane domain and an intracellular signaling domain comprising at least two functional signaling domains derived from one or more costimulatory molecule(s) and a functional signaling domain derived from a stimulatory molecule. In one aspect the CAR comprises an optional leader sequence at the amino-terminus (N-ter) of the CAR fusion protein. In one aspect, the CAR further comprises a leader sequence at the N-terminus of the extracellular antigen binding domain, wherein the leader sequence is optionally cleaved from the antigen binding domain (e.g., a scFv) during cellular processing and localization of the CAR to the cellular membrane.

[0209] A CAR that comprises an antigen binding domain (e.g., a scFv, or TCR) that targets a specific tumor maker X, such as those described herein, is also referred to as XCAR. For example, a CAR that comprises an antigen binding domain that targets CD19 is referred to as CD19CAR.

[0210] The term “signaling domain” refers to the functional portion of a protein which acts by transmitting information within the cell to regulate cellular activity via defined signaling pathways by generating second messengers or functioning as effectors by responding to such messengers.

[0211] The term “antibody,” as used herein, refers to a protein, or polypeptide sequence derived from an immunoglobulin molecule which specifically binds with an antigen. Antibodies can be polyclonal or monoclonal, multiple or single chain, or intact immunoglobulins, and may be derived from natural sources or from recombinant sources. Antibodies can be tetramers of immunoglobulin molecules.

[0212] The term “antibody fragment” refers to at least one portion of an antibody, that retains the ability to specifically interact with (e.g., by binding, steric hindrance, stabilizing/destabilizing, spatial distribution) an epitope of an antigen. Examples of antibody fragments include, but are not limited to, Fab, Fab′, F(ab′)₂, Fv fragments, scFv antibody fragments, disulfide-linked Fvs (sdFv), a Fd fragment consisting of the VH and CH1 domains, linear antibodies, single domain antibodies such as sdAb (either VL or VH), camelid VHH domains, multi-specific antibodies formed from antibody fragments such as a bivalent fragment comprising two Fab fragments linked by a disulfide bridge at the hinge region, and an isolated CDR or other epitope binding fragments of an antibody. An antigen binding fragment can also be incorporated into single domain antibodies, maxibodies, minibodies, nanobodies, intrabodies, diabodies, triabodies, tetrabodies, v-NAR and bis-scFv (see, e.g., Hollinger and Hudson, Nature Biotechnology 23:1126-1136, 2005). Antigen binding fragments can also be grafted into scaffolds based on polypeptides such as a fibronectin type III (Fn3)(see U.S. Pat. No. 6,703,199, which describes fibronectin polypeptide minibodies).

[0213] The term “scFv” refers to a fusion protein comprising at least one antibody fragment comprising a variable region of a light chain and at least one antibody fragment comprising a variable region of a heavy chain, wherein the light and heavy chain variable regions are contiguously linked, e.g., via a synthetic linker, e.g., a short flexible polypeptide linker, and capable of being expressed as a single chain polypeptide, and wherein the scFv retains the specificity of the intact antibody from which it is derived. Unless specified, as used herein an scFv may have the VL and VH variable regions in either order, e.g., with respect to the N-terminal and C-terminal ends of the polypeptide, the scFv may comprise VL-linker-VH or may comprise VH-linker-VL.

[0214] The portion of the CAR comprising an antibody or antibody fragment thereof may exist in a variety of forms where the antigen binding domain is expressed as part of a contiguous polypeptide chain including, for example, a single domain antibody fragment (sdAb), a single chain antibody (scFv), a humanized antibody or bispecific antibody (Harlow et al., 1999, In: Using Antibodies: A Laboratory Manual, Cold Spring Harbor Laboratory Press, NY; Harlow et al., 1989, In: Antibodies: A Laboratory Manual, Cold Spring Harbor, New York; Houston et al., 1988, Proc. Natl. Acad. Sci. USA 85:5879-5883; Bird et al., 1988, Science 242:423-426). In one aspect, the antigen binding domain of a CAR composition of the invention comprises an antibody fragment. In a further aspect, the CAR comprises an antibody fragment that comprises a scFv. The precise amino acid sequence boundaries of a given CDR can be determined using any of a number of well-known schemes, including those described by Kabat et al. (1991), “Sequences of Proteins of Immunological Interest,” 5th Ed. Public Health Service, National Institutes of Health, Bethesda, MD (“Kabat” numbering scheme), A1-Lazikani et al., (1997) JMB 273, 927-948 (“Chothia” numbering scheme), or a combination thereof.

[0215] As used herein, the term “binding domain” or “antibody molecule” refers to a protein, e.g., an immunoglobulin chain or fragment thereof, comprising at least one immunoglobulin variable domain sequence. The term “binding domain” or “antibody molecule” encompasses antibodies and antibody fragments. In an embodiment, an antibody molecule is a multispecific antibody molecule, e.g., it comprises a plurality of immunoglobulin variable domain sequences, wherein a first immunoglobulin variable domain sequence of the plurality has binding specificity for a first epitope and a second immunoglobulin variable domain sequence of the plurality has binding specificity for a second epitope. In an embodiment, a multispecific antibody molecule is a bispecific antibody molecule. A bispecific antibody has specificity for no more than two antigens. A bispecific antibody molecule is characterized by a first immunoglobulin variable domain sequence which has binding specificity for a first epitope and a second immunoglobulin variable domain sequence that has binding specificity for a second epitope.

[0216] The portion of the CAR comprising an antibody or antibody fragment thereof may exist in a variety of forms where the antigen binding domain is expressed as part of a contiguous polypeptide chain including, for example, a single domain antibody fragment (sdAb), a single chain antibody (scFv), a humanized antibody, or bispecific antibody (Harlow et al., 1999, In: Using Antibodies: A Laboratory Manual, Cold Spring Harbor Laboratory Press, NY; Harlow et al., 1989, In: Antibodies: A Laboratory Manual, Cold Spring Harbor, New York; Houston et al., 1988, Proc. Natl. Acad. Sci. USA 85:5879-5883; Bird et al., 1988, Science 242:423-426). In one aspect, the antigen binding domain of a CAR composition of the invention comprises an antibody fragment. In a further aspect, the CAR comprises an antibody fragment that comprises a scFv.

[0217] The term “antibody heavy chain,” refers to the larger of the two types of polypeptide chains present in antibody molecules in their naturally occurring conformations, and which normally determines the class to which the antibody belongs.

[0218] The term “antibody light chain,” refers to the smaller of the two types of polypeptide chains present in antibody molecules in their naturally occurring conformations. Kappa (κ) and lambda (λ) light chains refer to the two major antibody light chain isotypes.

[0219] The term “recombinant antibody” refers to an antibody which is generated using recombinant DNA technology, such as, for example, an antibody expressed by a bacteriophage or yeast expression system. The term should also be construed to mean an antibody which has been generated by the synthesis of a DNA molecule encoding the antibody and which DNA molecule expresses an antibody protein, or an amino acid sequence specifying the antibody, wherein the DNA or amino acid sequence has been obtained using recombinant DNA or amino acid sequence technology which is available and well known in the art.

[0220] The term “antigen” or “Ag” refers to a molecule that provokes an immune response. This immune response may involve either antibody production, or the activation of specific immunologically-competent cells, or both. The skilled artisan will understand that any macromolecule, including virtually all proteins or peptides, can serve as an antigen. Furthermore, antigens can be derived from recombinant or genomic DNA. A skilled artisan will understand that any DNA, which comprises a nucleotide sequences or a partial nucleotide sequence encoding a protein that elicits an immune response therefore encodes an “antigen” as that term is used herein. Furthermore, one skilled in the art will understand that an antigen need not be encoded solely by a full length nucleotide sequence of a gene. It is readily apparent that the present invention includes, but is not limited to, the use of partial nucleotide sequences of more than one gene and that these nucleotide sequences are arranged in various combinations to encode polypeptides that elicit the desired immune response. Moreover, a skilled artisan will understand that an antigen need not be encoded by a “gene” at all. It is readily apparent that an antigen can be generated synthesized or can be derived from a biological sample, or might be macromolecule besides a polypeptide. Such a biological sample can include, but is not limited to a tissue sample, a tumor sample, a cell or a fluid with other biological components.

[0221] As used herein, the term “SHP inhibitor” refers to any molecule capable of inhibiting or reducing expression and/or function of SHP. In one embodiment, the SHP inhibitor is a SHP inhibitor molecule. The term “SHP inhibitor molecule” refers to a nucleic acid or a polypeptide that interferes with SHP signaling (e.g., interferes with SHP-1 signaling or SHP-2 signaling, or both), e.g., in a cell, e.g., an immune effector cells. In some embodiments, the SHP inhibitor molecule is a dominant negative molecule that interferes with SHP signaling in a cell, e.g., an immune effector cell, e.g., an immune effector cell that expresses a CAR molecule (e.g., a CAR polypeptide) that binds to a tumor antigen. The SHP inhibitor can reduce the effects of one or more IRs by inhibiting a signaling component of multiple IR pathways. The SHP inhibitor molecules described herein, when expressed in an immune effector cell, e.g., a CAR-expressing immune effector cell, can result in one or more of: (i) reduced immune checkpoint inhibition, e.g., IR inhibitor, (ii) reduced IR signaling, e.g., PD-1/PD-L1 signalling, (iii) increased levels of CD3z phosphorylation, (iv) increased levels of LAT phosphorylation, (v) increased phosphorylation of Lck, (vi) increased phosphorylation of ZAP70, (vii) increased expression of a cytokine, e.g., IFNγ or IL2, (viii) increased CAR and/or TCR signalling, (ix) increased killing of a tumor cell, e.g., a solid tumor cell, via a CAR molecule, in vitro and in vivo, e.g., compared to an otherwise similar cell that lacks the SHP inhibitor molecule.

[0222] In embodiments where the SHP inhibitor molecule is a polypeptide, also, referred to herein as an “SHP inhibitor polypeptide.” In some embodiments, the SHP inhibitor polypeptide includes an amino acid sequence derived from SHP1 (also known as: Src homology region 2 domain-containing phosphatase-1, or tyrosine-protein phosphatase non-receptor type 6) or an amino acid sequence derived from SHP2 (also known as: protein-tyrosoine phosphatase 1D (PTP-1D), protein-tyrosine phosphatase 2C (PTP-2C), or tyrosine-protein phosphatase non-receptor type 11 (PTPN11)) that inhibits the function of SHP1, SHP2, or both SHP1 and SHP2. In some embodiments, an SHP inhibitor polypeptide comprises less than 240, 220, 180, 160, 140, 120, 100, 80, 60, or 40 amino acids in length. In some embodiments, the SHP inhibitor polypeptide comprises an amino acid sequence at least 75, 80, 85, 90, 95, 99, or 100% identical to a corresponding sequence of SHP-1 or SHP-2, described herein as SEQ ID NO: 1 or SEQ ID NO:2, respectively. In some embodiments, the SHP inhibitor polypeptide comprises a single domain of SHP1 or SHP2, e.g., an SH2-N domain. In some embodiments, the SHP inhibitor polypeptide comprises one or more mutations, e.g., substitutions, insertions, or deletions, relative to the amino acid sequence of SHP1 or SHP2. In some embodiments, the SHP inhibitor polypeptide includes a mutation in the N-terminal region of the SHP, e.g., the N—SH2 region of an SHP, e.g., an SHP-1 or SHP-2. In some embodiments, the mutation is in the binding region of the N—SH2 region for an ITIM, e.g., an ITIM-domain present in an IR, e.g., PD-1. In some embodiments, the N—SH2 mutation is at position 30 of SHP-1, e.g., an R30K substitution in SHP-1 as described herein. Alternatively or in combination with the N—SH2 region mutation, the SHP inhibitor has a mutation in, e.g., a deletion of, part or all of the catalytic domain, e.g., the phosphatase domain, of an SHP, e.g., an SHP-1 or SHP-2.

[0223] The terms “SHP1 polypeptide” and “SHP2 polypeptide” refer to SHP polypeptides derived from (e.g., having an amino acid sequence identical or substantially identical to) SHP1 and SHP2, respectively.

[0224] The terms “N—SH2” and “SH2-N” refer to the N-terminal SH2 domain of SHP1 or SHP2.

[0225] The terms “N-SH2-R30K”, “SH2-N—R30K”, “N-SH2-R30K SHP1” and variants thereof refer to a SHP inhibitor polypeptide comprising an amino acid sequence derived from N-terminal SH2 domain of SHP1, further comprising a mutation at position 30 from arginine to lysine.

[0226] The term “anti-cancer effect” refers to a biological effect which can be manifested by various means, including but not limited to, e.g., a decrease in tumor volume, a decrease in the number of cancer cells, a decrease in the number of metastases, an increase in life expectancy, decrease in cancer cell proliferation, decrease in cancer cell survival, or amelioration of various physiological symptoms associated with the cancerous condition. An “anti-cancer effect” can also be manifested by the ability of the peptides, polynucleotides, cells and antibodies in prevention of the occurrence of cancer in the first place. The term “anti-tumor effect” refers to a biological effect which can be manifested by various means, including but not limited to, e.g., a decrease in tumor volume, a decrease in the number of tumor cells, a decrease in tumor cell proliferation, or a decrease in tumor cell survival.

[0227] The term “autologous” refers to any material derived from the same individual to whom it is later to be re-introduced into the individual.

[0228] The term “allogeneic” refers to any material derived from a different animal of the same species as the individual to whom the material is introduced. Two or more individuals are said to be allogeneic to one another when the genes at one or more loci are not identical. In some aspects, allogeneic material from individuals of the same species may be sufficiently unlike genetically to interact antigenically

[0229] The term “xenogeneic” refers to a graft derived from an animal of a different species.

[0230] The term “cancer” refers to a disease characterized by the uncontrolled growth of aberrant cells. Cancer cells can spread locally or through the bloodstream and lymphatic system to other parts of the body. Examples of various cancers are described herein and include but are not limited to, breast cancer, prostate cancer, ovarian cancer, cervical cancer, skin cancer, pancreatic cancer, colorectal cancer, renal cancer, liver cancer, brain cancer, lymphoma, leukemia, lung cancer and the like. The terms “tumor” and “cancer” are used interchangeably herein, e.g., both terms encompass solid and liquid, e.g., diffuse or circulating, tumors. As used herein, the term “cancer” or “tumor” includes premalignant, as well as malignant cancers and tumors.

[0231] “Derived from” as that term is used herein, indicates a relationship between a first and a second molecule. It generally refers to structural similarity between the first molecule and a second molecule and does not connotate or include a process or source limitation on a first molecule that is derived from a second molecule. For example, in the case of an intracellular signaling domain that is derived from a CD3zeta molecule, the intracellular signaling domain retains sufficient CD3zeta structure such that is has the required function, namely, the ability to generate a signal under the appropriate conditions. It does not connotate or include a limitation to a particular process of producing the intracellular signaling domain, e.g., it does not mean that, to provide the intracellular signaling domain, one must start with a CD3zeta sequence and delete unwanted sequence, or impose mutations, to arrive at the intracellular signaling domain.

[0232] The phrase “disease associated with expression of a tumor antigen as described herein” includes, but is not limited to, a disease associated with expression of a tumor antigen as described herein or condition associated with cells which express a tumor antigen as described herein including, e.g., proliferative diseases such as a cancer or malignancy or a precancerous condition such as a myelodysplasia, a myelodysplastic syndrome or a preleukemia; or a noncancer related indication associated with cells which express a tumor antigen as described herein. In one aspect, a cancer associated with expression of a tumor antigen as described herein is a hematological cancer. In one aspect, a cancer associated with expression of a tumor antigen as described herein is a solid cancer. Further diseases associated with expression of a tumor antigen described herein include, but not limited to, e.g., atypical and/or non-classical cancers, malignancies, precancerous conditions or proliferative diseases associated with expression of a tumor antigen as described herein. Non-cancer related indications associated with expression of a tumor antigen as described herein include, but are not limited to, e.g., autoimmune disease, (e.g., lupus), inflammatory disorders (allergy and asthma) and transplantation. In some embodiments, the tumor antigen-expressing cells express, or at any time expressed, mRNA encoding the tumor antigen. In an embodiment, the tumor antigen-expressing cells produce the tumor antigen protein (e.g., wild-type or mutant), and the tumor antigen protein may be present at normal levels or reduced levels. In an embodiment, the tumor antigen-expressing cells produced detectable levels of a tumor antigen protein at one point, and subsequently produced substantially no detectable tumor antigen protein.

[0233] The term “conservative sequence modifications” refers to amino acid modifications that do not significantly affect or alter the binding characteristics of the antibody or antibody fragment containing the amino acid sequence. Such conservative modifications include amino acid substitutions, additions and deletions. Modifications can be introduced into an antibody or antibody fragment of the invention by standard techniques known in the art, such as site-directed mutagenesis and PCR-mediated mutagenesis. Conservative amino acid substitutions are ones in which the amino acid residue is replaced with an amino acid residue having a similar side chain. Families of amino acid residues having similar side chains have been defined in the art. These families include amino acids with basic side chains (e.g., lysine, arginine, histidine), acidic side chains (e.g., aspartic acid, glutamic acid), uncharged polar side chains (e.g., glycine, asparagine, glutamine, serine, threonine, tyrosine, cysteine, tryptophan), nonpolar side chains (e.g., alanine, valine, leucine, isoleucine, proline, phenylalanine, methionine), beta-branched side chains (e.g., threonine, valine, isoleucine) and aromatic side chains (e.g., tyrosine, phenylalanine, tryptophan, histidine). Thus, one or more amino acid residues within a CAR of the invention can be replaced with other amino acid residues from the same side chain family and the altered CAR can be tested using the functional assays described herein.

[0234] The term “stimulation,” refers to a primary response induced by binding of a stimulatory molecule (e.g., a TCR/CD3 complex or CAR) with its cognate ligand (or tumor antigen in the case of a CAR) thereby mediating a signal transduction event, such as, but not limited to, signal transduction via the TCR/CD3 complex or signal transduction via the appropriate NK receptor or signaling domains of the CAR. Stimulation can mediate altered expression of certain molecules.

[0235] The term “stimulatory molecule,” refers to a molecule expressed by an immune cell (e.g., T cell, NK cell, B cell) that provides the cytoplasmic signaling sequence(s) that regulate activation of the immune cell in a stimulatory way for at least some aspect of the immune cell signaling pathway. In one aspect, the signal is a primary signal that is initiated by, for instance, binding of a TCR/CD3 complex with an MHC molecule loaded with peptide, and which leads to mediation of a T cell response, including, but not limited to, proliferation, activation, differentiation, and the like. A primary cytoplasmic signaling sequence (also referred to as a “primary signaling domain”) that acts in a stimulatory manner may contain a signaling motif which is known as immunoreceptor tyrosine-based activation motif or ITAM. Examples of an ITAM containing cytoplasmic signaling sequence that is of particular use in the invention includes, but is not limited to, those derived from CD3 zeta, common FcR gamma (FCER1G), Fc gamma RIIa, FcR beta (Fc Epsilon Rib), CD3 gamma, CD3 delta, CD3 epsilon, CD79a, CD79b, DAP10, and DAP12. In a specific CAR of the invention, the intracellular signaling domain in any one or more CARS of the invention comprises an intracellular signaling sequence, e.g., a primary signaling sequence of CD3-zeta. In a specific CAR of the invention, the primary signaling sequence of CD3-zeta is the sequence provided as SEQ ID NO:18, or the equivalent residues from a non-human species, e.g., mouse, rodent, monkey, ape and the like. In a specific CAR of the invention, the primary signaling sequence of CD3-zeta is the sequence as provided in SEQ ID NO:20, or the equivalent residues from a non-human species, e.g., mouse, rodent, monkey, ape and the like.

[0236] The term “antigen presenting cell” or “APC” refers to an immune system cell such as an accessory cell (e.g., a B-cell, a dendritic cell, and the like) that displays a foreign antigen complexed with major histocompatibility complexes (MHC's) on its surface. T-cells may recognize these complexes using their T-cell receptors (TCRs). APCs process antigens and present them to T-cells.

[0237] An “intracellular signaling domain,” as the term is used herein, refers to an intracellular portion of a molecule. The intracellular signaling domain generates a signal that promotes an immune effector function of the CAR containing cell, e.g., a CART cell. Examples of immune effector function, e.g., in a CART cell, include cytolytic activity and helper activity, including the secretion of cytokines.

[0238] In an embodiment, the intracellular signaling domain can comprise a primary intracellular signaling domain. Exemplary primary intracellular signaling domains include those derived from the molecules responsible for primary stimulation, or antigen dependent simulation. In an embodiment, the intracellular signaling domain can comprise a costimulatory intracellular domain. Exemplary costimulatory intracellular signaling domains include those derived from molecules responsible for costimulatory signals, or antigen independent stimulation. For example, in the case of a CART, a primary intracellular signaling domain can comprise a cytoplasmic sequence of a T cell receptor, and a costimulatory intracellular signaling domain can comprise cytoplasmic sequence from co-receptor or costimulatory molecule.

[0239] A primary intracellular signaling domain can comprise a signaling motif which is known as an immunoreceptor tyrosine-based activation motif or ITAM. Examples of ITAM containing primary cytoplasmic signaling sequences include, but are not limited to, those derived from CD3 zeta, common FcR gamma (FCER1G), Fc gamma RIIa, FcR beta (Fc Epsilon R1b), CD3 gamma, CD3 delta, CD3 epsilon, CD79a, CD79b, DAP10, and DAP12.

[0240] The term “zeta” or alternatively “zeta chain”, “CD3-zeta” or “TCR-zeta” is defined as the protein provided as GenBank Acc. No. BAG36664.1, or the equivalent residues from a non-human species, e.g., mouse, rodent, monkey, ape and the like, and a “zeta stimulatory domain” or alternatively a “CD3-zeta stimulatory domain” or a “TCR-zeta stimulatory domain” is defined as the amino acid residues from the cytoplasmic domain of the zeta chain, or functional derivatives thereof, that are sufficient to functionally transmit an initial signal necessary for T cell activation. In one aspect the cytoplasmic domain of zeta comprises residues 52 through 164 of GenBank Acc. No. BAG36664.1 or the equivalent residues from a non-human species, e.g., mouse, rodent, monkey, ape and the like, that are functional orthologs thereof. In one aspect, the “zeta stimulatory domain” or a “CD3-zeta stimulatory domain” is the sequence provided as SEQ ID NO:18. In one aspect, the “zeta stimulatory domain” or a “CD3-zeta stimulatory domain” is the sequence provided as SEQ ID NO:20.

[0241] The term a “costimulatory molecule” refers to a cognate binding partner on a T cell that specifically binds with a costimulatory ligand, thereby mediating a costimulatory response by the T cell, such as, but not limited to, proliferation. Costimulatory molecules are cell surface molecules other than antigen receptors or their ligands that are contribute to an efficient immune response. Costimulatory molecules include, but are not limited to an MHC class I molecule, BTLA and a Toll ligand receptor, as well as OX40, CD27, CD28, CDS, ICAM-1, LFA-1 (CD11a/CD18), ICOS (CD278), and 4-1BB (CD137). Further examples of such costimulatory molecules include CDS, ICAM-1, GITR, BAFFR, HVEM (LIGHTR), SLAMF7, NKp80 (KLRF1), NKp44, NKp30, NKp46, CD160, CD19, CD4, CD8alpha, CD8beta, IL2R beta, IL2R gamma, IL7R alpha, ITGA4, VLA1, CD49a, ITGA4, IA4, CD49D, ITGA6, VLA-6, CD49f, ITGAD, CD11d, ITGAE, CD103, ITGAL, CD11a, LFA-1, ITGAM, CD11b, ITGAX, CD11c, ITGB1, CD29, ITGB2, CD18, LFA-1, ITGB7, NKG2D, NKG2C, TNFR2, TRANCE/RANKL, DNAM1 (CD226), SLAMF4 (CD244, 2B4), CD84, CD96 (Tactile), CEACAM1, CRTAM, Ly9 (CD229), CD160 (BY55), PSGL1, CD100 (SEMA4D), CD69, SLAMF6 (NTB-A, Ly108), SLAM (SLAMF1, CD150, IPO-3), BLAME (SLAMF8), SELPLG (CD162), LTBR, LAT, GADS, SLP-76, PAG/Cbp, CD19a, and a ligand that specifically binds with CD83.

[0242] A costimulatory intracellular signaling domain can be the intracellular portion of a costimulatory molecule. A costimulatory molecule can be represented in the following protein families: TNF receptor proteins, Immunoglobulin-like proteins, cytokine receptors, integrins, signaling lymphocytic activation molecules (SLAM proteins), and activating NK cell receptors. Examples of such molecules include CD27, CD28, 4-1BB (CD137), OX40, CD28-OX40, CD28-4-1BB, GITR, CD30, CD40, ICOS, BAFFR, HVEM, ICAM-1, lymphocyte function-associated antigen-1 (LFA-1), CD2, CDS, CD7, CD287, LIGHT, NKG2C, NKG2D, SLAMF7, NKp80, NKp30, NKp44, NKp46, CD160, B7-H3, and a ligand that specifically binds with CD83, and the like.

[0243] The intracellular signaling domain can comprise the entire intracellular portion, or the entire native intracellular signaling domain, of the molecule from which it is derived, or a functional fragment or derivative thereof.

[0244] The term “4-1BB” refers to a member of the TNFR superfamily with an amino acid sequence provided as GenBank Acc. No. AAA62478.2, or the equivalent residues from a non-human species, e.g., mouse, rodent, monkey, ape and the like; and a “4-1BB costimulatory domain” is defined as amino acid residues 214-255 of GenBank Acc. No. AAA62478.2, or the equivalent residues from a non-human species, e.g., mouse, rodent, monkey, ape and the like. In one aspect, the “4-1BB costimulatory domain” is the sequence provided as SEQ ID NO:14 or the equivalent residues from a non-human species, e.g., mouse, rodent, monkey, ape and the like.

[0245] “Immune effector cell,” as that term is used herein, refers to a cell that is involved in an immune response, e.g., in the promotion of an immune effector response. Examples of immune effector cells include T cells, e.g., alpha/beta T cells and gamma/delta T cells, B cells, natural killer (NK) cells, natural killer T (NKT) cells, mast cells, and myeloid-derived phagocytes.

[0246] “Immune effector function or immune effector response,” as that term is used herein, refers to function or response, e.g., of an immune effector cell, that enhances or promotes an immune attack of a target cell. E.g., an immune effector function or response refers a property of a T or NK cell that promotes killing or the inhibition of growth or proliferation, of a target cell. In the case of a T cell, primary stimulation and co-stimulation are examples of immune effector function or response.

[0247] The term “encoding” refers to the inherent property of specific sequences of nucleotides in a polynucleotide, such as a gene, a cDNA, or an mRNA, to serve as templates for synthesis of other polymers and macromolecules in biological processes having either a defined sequence of nucleotides (e.g., rRNA, tRNA and mRNA) or a defined sequence of amino acids and the biological properties resulting therefrom. Thus, a gene, cDNA, or RNA, encodes a protein if transcription and translation of mRNA corresponding to that gene produces the protein in a cell or other biological system. Both the coding strand, the nucleotide sequence of which is identical to the mRNA sequence and is usually provided in sequence listings, and the non-coding strand, used as the template for transcription of a gene or cDNA, can be referred to as encoding the protein or other product of that gene or cDNA.

[0248] Unless otherwise specified, a “nucleotide sequence encoding an amino acid sequence” includes all nucleotide sequences that are degenerate versions of each other and that encode the same amino acid sequence. The phrase nucleotide sequence that encodes a protein or a RNA may also include introns to the extent that the nucleotide sequence encoding the protein may in some version contain an intron(s).

[0249] The term “effective amount” or “therapeutically effective amount” are used interchangeably herein, and refer to an amount of a compound, formulation, material, or composition, as described herein effective to achieve a particular biological result.

[0250] The term “endogenous” refers to any material from or produced inside an organism, cell, tissue or system.

[0251] The term “exogenous” refers to any material introduced from or produced outside an organism, cell, tissue or system.

[0252] The term “expression” refers to the transcription and/or translation of a particular nucleotide sequence driven by a promoter.

[0253] The term “transfer vector” refers to a composition of matter which comprises an isolated nucleic acid and which can be used to deliver the isolated nucleic acid to the interior of a cell. Numerous vectors are known in the art including, but not limited to, linear polynucleotides, polynucleotides associated with ionic or amphiphilic compounds, plasmids, and viruses. Thus, the term “transfer vector” includes an autonomously replicating plasmid or a virus. The term should also be construed to further include non-plasmid and non-viral compounds which facilitate transfer of nucleic acid into cells, such as, for example, a polylysine compound, liposome, and the like. Examples of viral transfer vectors include, but are not limited to, adenoviral vectors, adeno-associated virus vectors, retroviral vectors, lentiviral vectors, and the like.

[0254] The term “expression vector” refers to a vector comprising a recombinant polynucleotide comprising expression control sequences operatively linked to a nucleotide sequence to be expressed. An expression vector comprises sufficient cis-acting elements for expression; other elements for expression can be supplied by the host cell or in an in vitro expression system. Expression vectors include all those known in the art, including cosmids, plasmids (e.g., naked or contained in liposomes) and viruses (e.g., lentiviruses, retroviruses, adenoviruses, and adeno-associated viruses) that incorporate the recombinant polynucleotide.

[0255] The term “lentivirus” refers to a genus of the Retroviridae family. Lentiviruses are unique among the retroviruses in being able to infect non-dividing cells; they can deliver a significant amount of genetic information into the DNA of the host cell, so they are one of the most efficient methods of a gene delivery vector. HIV, SIV, and FIV are all examples of lentiviruses.

[0256] The term “lentiviral vector” refers to a vector derived from at least a portion of a lentivirus genome, including especially a self-inactivating lentiviral vector as provided in Milone et al., Mol. Ther. 17(8): 1453-1464 (2009). Other examples of lentivirus vectors that may be used in the clinic, include but are not limited to, e.g., the LENTIVECTOR® gene delivery technology from Oxford BioMedica, the LENTIMAX™ vector system from Lentigen and the like. Nonclinical types of lentiviral vectors are also available and would be known to one skilled in the art.

[0257] The term “homologous” or “identity” refers to the subunit sequence identity between two polymeric molecules, e.g., between two nucleic acid molecules, such as, two DNA molecules or two RNA molecules, or between two polypeptide molecules. When a subunit position in both of the two molecules is occupied by the same monomeric subunit; e.g., if a position in each of two DNA molecules is occupied by adenine, then they are homologous or identical at that position. The homology between two sequences is a direct function of the number of matching or homologous positions; e.g., if half (e.g., five positions in a polymer ten subunits in length) of the positions in two sequences are homologous, the two sequences are 50% homologous; if 90% of the positions (e.g., 9 of 10), are matched or homologous, the two sequences are 90% homologous.

[0258] “Humanized” forms of non-human (e.g., murine) antibodies are chimeric immunoglobulins, immunoglobulin chains or fragments thereof (such as Fv, Fab, Fab′, F(ab′)2 or other antigen-binding subsequences of antibodies) which contain minimal sequence derived from non-human immunoglobulin. For the most part, humanized antibodies and antibody fragments thereof are human immunoglobulins (recipient antibody or antibody fragment) in which residues from a complementary-determining region (CDR) of the recipient are replaced by residues from a CDR of a non-human species (donor antibody) such as mouse, rat or rabbit having the desired specificity, affinity, and capacity. In some instances, Fv framework region (FR) residues of the human immunoglobulin are replaced by corresponding non-human residues. Furthermore, a humanized antibody/antibody fragment can comprise residues which are found neither in the recipient antibody nor in the imported CDR or framework sequences. These modifications can further refine and optimize antibody or antibody fragment performance. In general, the humanized antibody or antibody fragment thereof will comprise substantially all of at least one, and typically two, variable domains, in which all or substantially all of the CDR regions correspond to those of a non-human immunoglobulin and all or a significant portion of the FR regions are those of a human immunoglobulin sequence. The humanized antibody or antibody fragment can also comprise at least a portion of an immunoglobulin constant region (Fc), typically that of a human immunoglobulin. For further details, see Jones et al., Nature, 321: 522-525, 1986; Reichmann et al., Nature, 332: 323-329, 1988; Presta, Curr. Op. Struct. Biol., 2: 593-596, 1992.

[0259] “Fully human” refers to an immunoglobulin, such as an antibody or antibody fragment, where the whole molecule is of human origin or consists of an amino acid sequence identical to a human form of the antibody or immunoglobulin.

[0260] The term “isolated” means altered or removed from the natural state. For example, a nucleic acid or a peptide naturally present in a living animal is not “isolated,” but the same nucleic acid or peptide partially or completely separated from the coexisting materials of its natural state is “isolated.” An isolated nucleic acid or protein can exist in substantially purified form, or can exist in a non-native environment such as, for example, a host cell.

[0261] In the context of the present invention, the following abbreviations for the commonly occurring nucleic acid bases are used. “A” refers to adenosine, “C” refers to cytosine, “G” refers to guanosine, “T” refers to thymidine, and “U” refers to uridine.

[0262] The term “operably linked” or “transcriptional control” refers to functional linkage between a regulatory sequence and a heterologous nucleic acid sequence resulting in expression of the latter. For example, a first nucleic acid sequence is operably linked with a second nucleic acid sequence when the first nucleic acid sequence is placed in a functional relationship with the second nucleic acid sequence. For instance, a promoter is operably linked to a coding sequence if the promoter affects the transcription or expression of the coding sequence. Operably linked DNA sequences can be contiguous with each other and, e.g., where necessary to join two protein coding regions, are in the same reading frame.

[0263] The term “parenteral” administration of an immunogenic composition includes, e.g., subcutaneous (s.c.), intravenous (i.v.), intramuscular (i.m.), or intrasternal injection, intratumoral, or infusion techniques.

[0264] The term “nucleic acid”, “nucleic acid molecule,” or “polynucleotide” refers to deoxyribonucleic acids (DNA) or ribonucleic acids (RNA) and polymers thereof in either single- or double-stranded form. Unless specifically limited, the term encompasses nucleic acids containing known analogues of natural nucleotides that have similar binding properties as the reference nucleic acid and are metabolized in a manner similar to naturally occurring nucleotides. Unless otherwise indicated, a particular nucleic acid sequence also implicitly encompasses conservatively modified variants thereof (e.g., degenerate codon substitutions), alleles, orthologs, SNPs, and complementary sequences as well as the sequence explicitly indicated. Specifically, degenerate codon substitutions may be achieved by generating sequences in which the third position of one or more selected (or all) codons is substituted with mixed-base and/or deoxyinosine residues (Batzer et al., Nucleic Acid Res. 19:5081 (1991); Ohtsuka et al., J. Biol. Chem. 260:2605-2608 (1985); and Rossolini et al., Mol. Cell. Probes 8:91-98 (1994)).

[0265] The terms “peptide,” “polypeptide,” and “protein” are used interchangeably, and refer to a compound comprised of amino acid residues covalently linked by peptide bonds. A protein or peptide must contain at least two amino acids, and no limitation is placed on the maximum number of amino acids that can comprise a protein's or peptide's sequence. Polypeptides include any peptide or protein comprising two or more amino acids joined to each other by peptide bonds. As used herein, the term refers to both short chains, which also commonly are referred to in the art as peptides, oligopeptides and oligomers, for example, and to longer chains, which generally are referred to in the art as proteins, of which there are many types. “Polypeptides” include, for example, biologically active fragments, substantially homologous polypeptides, oligopeptides, homodimers, heterodimers, variants of polypeptides, modified polypeptides, derivatives, analogs, fusion proteins, among others. A polypeptide includes a natural peptide, a recombinant peptide, or a combination thereof.

[0266] The term “promoter” refers to a DNA sequence recognized by the synthetic machinery of the cell, or introduced synthetic machinery, required to initiate the specific transcription of a polynucleotide sequence.

[0267] The term “promoter/regulatory sequence” refers to a nucleic acid sequence which is required for expression of a gene product operably linked to the promoter/regulatory sequence. In some instances, this sequence may be the core promoter sequence and in other instances, this sequence may also include an enhancer sequence and other regulatory elements which are required for expression of the gene product. The promoter/regulatory sequence may, for example, be one which expresses the gene product in a tissue specific manner.

[0268] The term “constitutive” promoter refers to a nucleotide sequence which, when operably linked with a polynucleotide which encodes or specifies a gene product, causes the gene product to be produced in a cell under most or all physiological conditions of the cell.

[0269] The term “inducible” promoter refers to a nucleotide sequence which, when operably linked with a polynucleotide which encodes or specifies a gene product, causes the gene product to be produced in a cell substantially only when an inducer which corresponds to the promoter is present in the cell.

[0270] The term “tissue-specific” promoter refers to a nucleotide sequence which, when operably linked with a polynucleotide encodes or specified by a gene, causes the gene product to be produced in a cell substantially only if the cell is a cell of the tissue type corresponding to the promoter.

[0271] The terms “cancer associated antigen” or “tumor antigen” interchangeably refers to a molecule (typically a protein, carbohydrate or lipid) that is expressed on the surface of a cancer cell, either entirely or as a fragment (e.g., MHC/peptide), and which is useful for the preferential targeting of a pharmacological agent to the cancer cell. In some embodiments, a tumor antigen is a marker expressed by both normal cells and cancer cells, e.g., a lineage marker, e.g., CD19 on B cells. In some embodiments, a tumor antigen is a cell surface molecule that is overexpressed in a cancer cell in comparison to a normal cell, for instance, 1-fold over expression, 2-fold overexpression, 3-fold overexpression or more in comparison to a normal cell. In some embodiments, a tumor antigen is a cell surface molecule that is inappropriately synthesized in the cancer cell, for instance, a molecule that contains deletions, additions or mutations in comparison to the molecule expressed on a normal cell. In some embodiments, a tumor antigen will be expressed exclusively on the cell surface of a cancer cell, entirely or as a fragment (e.g., MHC/peptide), and not synthesized or expressed on the surface of a normal cell. In some embodiments, the CARs of the present invention includes CARs comprising an antigen binding domain (e.g., antibody or antibody fragment) that binds to a MHC presented peptide. Normally, peptides derived from endogenous proteins fill the pockets of Major histocompatibility complex (MHC) class I molecules, and are recognized by T cell receptors (TCRs) on CD8+T lymphocytes. The MHC class I complexes are constitutively expressed by all nucleated cells. In cancer, virus-specific and/or tumor-specific peptide/MHC complexes represent a unique class of cell surface targets for immunotherapy. TCR-like antibodies targeting peptides derived from viral or tumor antigens in the context of human leukocyte antigen (HLA)-A1 or HLA-A2 have been described (see, e.g., Sastry et al., J Virol. 2011 85(5):1935-1942; Sergeeva et al., Blood, 2011 117(16):4262-4272; Verma et al., J Immunol 2010 184(4):2156-2165; Willemsen et al., Gene Ther 2001 8(21):1601-1608; Dao et al., Sci Transl Med 2013 5(176):176ra33; Tassev et al., Cancer Gene Ther 2012 19(2):84-100). For example, TCR-like antibody can be identified from screening a library, such as a human scFv phage displayed library.

[0272] The term “tumor-supporting antigen” or “cancer-supporting antigen” interchangeably refer to a molecule (typically a protein, carbohydrate or lipid) that is expressed on the surface of a cell that is, itself, not cancerous, but supports the cancer cells, e.g., by promoting their growth or survival e.g., resistance to immune cells. Exemplary cells of this type include stromal cells and myeloid-derived suppressor cells (MDSCs). The tumor-supporting antigen itself need not play a role in supporting the tumor cells so long as the antigen is present on a cell that supports cancer cells.

[0273] The term “flexible polypeptide linker” or “linker” as used in the context of a scFv refers to a peptide linker that consists of amino acids such as glycine and/or serine residues used alone or in combination, to link variable heavy and variable light chain regions together. In one embodiment, the flexible polypeptide linker is a Gly/Ser linker and comprises the amino acid sequence (Gly-Gly-Gly-Ser)ₙ, where n is a positive integer equal to or greater than 1. For example, n=1, n=2, n=3. n=4, n=5 and n=6, n=7, n=8, n=9 and n=10 (SEQ ID NO:28). In one embodiment, the flexible polypeptide linkers include, but are not limited to, (Gly₄ Ser)₄ (SEQ ID NO:29) or (Gly₄ Ser)₃ (SEQ ID NO:30). In another embodiment, the linkers include multiple repeats of (Gly₂Ser), (GlySer) or (Gly₃Ser) (SEQ ID NO:31). Also included within the scope of the invention are linkers described in WO2012/138475, incorporated herein by reference).

[0274] As used herein, a 5′ cap (also termed an RNA cap, an RNA 7-methylguanosine cap or an RNA m⁷G cap) is a modified guanine nucleotide that has been added to the “front” or 5′ end of a eukaryotic messenger RNA shortly after the start of transcription. The 5′ cap consists of a terminal group which is linked to the first transcribed nucleotide. Its presence is critical for recognition by the ribosome and protection from RNases. Cap addition is coupled to transcription, and occurs co-transcriptionally, such that each influences the other. Shortly after the start of transcription, the 5′ end of the mRNA being synthesized is bound by a cap-synthesizing complex associated with RNA polymerase. This enzymatic complex catalyzes the chemical reactions that are required for mRNA capping. Synthesis proceeds as a multi-step biochemical reaction. The capping moiety can be modified to modulate functionality of mRNA such as its stability or efficiency of translation.

[0275] As used herein, “in vitro transcribed RNA” refers to RNA, preferably mRNA, that has been synthesized in vitro. Generally, the in vitro transcribed RNA is generated from an in vitro transcription vector. The in vitro transcription vector comprises a template that is used to generate the in vitro transcribed RNA.

[0276] As used herein, a “poly(A)” is a series of adenosines attached by polyadenylation to the mRNA. In the preferred embodiment of a construct for transient expression, the polyA is between 50 and 5000 (SEQ ID NO: 34), preferably greater than 64, more preferably greater than 100, most preferably greater than 300 or 400. poly(A) sequences can be modified chemically or enzymatically to modulate mRNA functionality such as localization, stability or efficiency of translation.

[0277] As used herein, “polyadenylation” refers to the covalent linkage of a polyadenylyl moiety, or its modified variant, to a messenger RNA molecule. In eukaryotic organisms, most messenger RNA (mRNA) molecules are polyadenylated at the 3′ end. The 3′ poly(A) tail is a long sequence of adenine nucleotides (often several hundred) added to the pre-mRNA through the action of an enzyme, polyadenylate polymerase. In higher eukaryotes, the poly(A) tail is added onto transcripts that contain a specific sequence, the polyadenylation signal. The poly(A) tail and the protein bound to it aid in protecting mRNA from degradation by exonucleases. Polyadenylation is also important for transcription termination, export of the mRNA from the nucleus, and translation. Polyadenylation occurs in the nucleus immediately after transcription of DNA into RNA, but additionally can also occur later in the cytoplasm. After transcription has been terminated, the mRNA chain is cleaved through the action of an endonuclease complex associated with RNA polymerase. The cleavage site is usually characterized by the presence of the base sequence AAUAAA near the cleavage site. After the mRNA has been cleaved, adenosine residues are added to the free 3′ end at the cleavage site.

[0278] As used herein, “transient” refers to expression of a non-integrated transgene for a period of hours, days or weeks, wherein the period of time of expression is less than the period of time for expression of the gene if integrated into the genome or contained within a stable plasmid replicon in the host cell.

[0279] As used herein, the terms “treat”, “treatment” and “treating” refer to the reduction or amelioration of the progression, severity and/or duration of a proliferative disorder, or the amelioration of one or more symptoms (preferably, one or more discernible symptoms) of a proliferative disorder resulting from the administration of one or more therapies (e.g., one or more therapeutic agents such as a CAR of the invention). In specific embodiments, the terms “treat”, “treatment” and “treating” refer to the amelioration of at least one measurable physical parameter of a proliferative disorder, such as growth of a tumor, not necessarily discernible by the patient. In other embodiments the terms “treat”, “treatment” and “treating”-refer to the inhibition of the progression of a proliferative disorder, either physically by, e.g., stabilization of a discernible symptom, physiologically by, e.g., stabilization of a physical parameter, or both. In other embodiments the terms “treat”, “treatment” and “treating” refer to the reduction or stabilization of tumor size or cancerous cell count.

[0280] The term “signal transduction pathway” refers to the biochemical relationship between a variety of signal transduction molecules that play a role in the transmission of a signal from one portion of a cell to another portion of a cell. The phrase “cell surface receptor” includes molecules and complexes of molecules capable of receiving a signal and transmitting signal across the membrane of a cell.

[0281] The term “subject” is intended to include living organisms in which an immune response can be elicited (e.g., mammals, human).

[0282] The term, a “substantially purified” cell refers to a cell that is essentially free of other cell types. A substantially purified cell also refers to a cell which has been separated from other cell types with which it is normally associated in its naturally occurring state. In some instances, a population of substantially purified cells refers to a homogenous population of cells. In other instances, this term refers simply to cell that have been separated from the cells with which they are naturally associated in their natural state. In some aspects, the cells are cultured in vitro. In other aspects, the cells are not cultured in vitro.

[0283] The term “substantially identical” refers to a relationship between two sequence polymers, e.g., two polypeptides or two nucleic acids, wherein the sequences, e.g., amino acid sequences or nucleic acid sequences, of the two sequence polymers are at least 85%, 90%, 95%, 97%, 98%, or 99% identical to each other.

[0284] The term “variant” refers to a polypeptide that has a substantially identical amino acid sequence to a reference amino acid sequence, or is encoded by a substantially identical nucleotide sequence. In some embodiments, the variant is a functional variant.

[0285] The term “functional variant” refers to a polypeptide that has a substantially identical amino acid sequence to a reference amino acid sequence, or is encoded by a substantially identical nucleotide sequence, and is capable of having one or more activities of the reference amino acid sequence.

[0286] The terms “does not substantially inhibit CAR signaling”, “does not substantially inhibit TCR signaling”, “does not substantially promote immune checkpoint inhibition”, “does not substantially promote PD-1/PD-L1 signalling”, and “does not substantially inhibit phosphorylation of CD3z” refer to a state that is less than 15%, 10%, 5%, 3%, or 1% altered in the relevant parameter relative to a reference state of the relevant parameter. For example, “the expression of a SHP inhibitor polypeptide does not substantially inhibit CAR signaling” means that, in this example, when a SHP inhibitor polypeptide is expressed, CAR signaling is reduced by less than 15%, 10%, 5%, 3%, or 1% when compared to a state where the SHP inhibitor polypeptide is not expressed.

[0287] The term “therapeutic” as used herein means a treatment. A therapeutic effect is obtained by reduction, suppression, remission, or eradication of a disease state.

[0288] The term “prophylaxis” as used herein means the prevention of or protective treatment for a disease or disease state.

[0289] In the context of the present invention, “tumor antigen” or “hyperproliferative disorder antigen” or “antigen associated with a hyperproliferative disorder” refers to antigens that are common to specific hyperproliferative disorders. In certain aspects, the hyperproliferative disorder antigens of the present invention are derived from, cancers including but not limited to primary or metastatic melanoma, thymoma, lymphoma, sarcoma, lung cancer, liver cancer, non-Hodgkin lymphoma, Hodgkin lymphoma, leukemias, uterine cancer, cervical cancer, bladder cancer, kidney cancer and adenocarcinomas such as breast cancer, prostate cancer, ovarian cancer, pancreatic cancer, and the like.

[0290] The term “transfected” or “transformed” or “transduced” refers to a process by which exogenous nucleic acid is transferred or introduced into the host cell. A “transfected” or “transformed” or “transduced” cell is one which has been transfected, transformed or transduced with exogenous nucleic acid. The cell includes the primary subject cell and its progeny.

[0291] The term “specifically binds,” refers to an antibody, or a ligand, which recognizes and binds with a binding partner (e.g., a tumor antigen) protein present in a sample, but which antibody or ligand does not substantially recognize or bind other molecules in the sample.

[0292] “Regulatable chimeric antigen receptor (RCAR),” as that term is used herein, refers to a set of polypeptides, typically two in the simplest embodiments, which when in a RCARX cell, provides the RCARX cell with specificity for a target cell, typically a cancer cell, and with regulatable intracellular signal generation or proliferation, which can optimize an immune effector property of the RCARX cell. An RCARX cell relies at least in part, on an antigen binding domain to provide specificity to a target cell that comprises the antigen bound by the antigen binding domain. In an embodiment, an RCAR includes a dimerization switch that, upon the presence of a dimerization molecule, can couple an intracellular signaling domain to the antigen binding domain.

[0293] “Membrane anchor” or “membrane tethering domain”, as that term is used herein, refers to a polypeptide or moiety, e.g., a myristoyl group, sufficient to anchor an extracellular or intracellular domain to the plasma membrane.

[0294] “Switch domain,” as that term is used herein, e.g., when referring to an RCAR, refers to an entity, typically a polypeptide-based entity, that, in the presence of a dimerization molecule, associates with another switch domain. The association results in a functional coupling of a first entity linked to, e.g., fused to, a first switch domain, and a second entity linked to, e.g., fused to, a second switch domain. A first and second switch domain are collectively referred to as a dimerization switch. In embodiments, the first and second switch domains are the same as one another, e.g., they are polypeptides having the same primary amino acid sequence, and are referred to collectively as a homodimerization switch. In embodiments, the first and second switch domains are different from one another, e.g., they are polypeptides having different primary amino acid sequences, and are referred to collectively as a heterodimerization switch. In embodiments, the switch is intracellular. In embodiments, the switch is extracellular. In embodiments, the switch domain is a polypeptide-based entity, e.g., FKBP or FRB-based, and the dimerization molecule is small molecule, e.g., a rapalogue. In embodiments, the switch domain is a polypeptide-based entity, e.g., an scFv that binds a myc peptide, and the dimerization molecule is a polypeptide, a fragment thereof, or a multimer of a polypeptide, e.g., a myc ligand or multimers of a myc ligand that bind to one or more myc scFvs. In embodiments, the switch domain is a polypeptide-based entity, e.g., myc receptor, and the dimerization molecule is an antibody or fragments thereof, e.g., myc antibody.

[0295] “Dimerization molecule,” as that term is used herein, e.g., when referring to an RCAR, refers to a molecule that promotes the association of a first switch domain with a second switch domain. In embodiments, the dimerization molecule does not naturally occur in the subject, or does not occur in concentrations that would result in significant dimerization. In embodiments, the dimerization molecule is a small molecule, e.g., rapamycin or a rapalogue, e.g., RAD001.

[0296] The term “bioequivalent” refers to an amount of an agent other than the reference compound (e.g., RAD001), required to produce an effect equivalent to the effect produced by the reference dose or reference amount of the reference compound (e.g., RAD001). In an embodiment the effect is the level of mTOR inhibition, e.g., as measured by P70 S6 kinase inhibition, e.g., as evaluated in an in vivo or in vitro assay, e.g., as measured by an assay described herein, e.g., the Boulay assay. In an embodiment, the effect is alteration of the ratio of PD-1 positive/PD-1 negative T cells, as measured by cell sorting. In an embodiment a bioequivalent amount or dose of an mTOR inhibitor is the amount or dose that achieves the same level of P70 S6 kinase inhibition as does the reference dose or reference amount of a reference compound. In an embodiment, a bioequivalent amount or dose of an mTOR inhibitor is the amount or dose that achieves the same level of alteration in the ratio of PD-1 positive/PD-1 negative T cells as does the reference dose or reference amount of a reference compound.

[0297] The term “low, immune enhancing, dose” when used in conjunction with an mTOR inhibitor, e.g., an allosteric mTOR inhibitor, e.g., RAD001 or rapamycin, or a catalytic mTOR inhibitor, refers to a dose of mTOR inhibitor that partially, but not fully, inhibits mTOR activity, e.g., as measured by the inhibition of P70 S6 kinase activity. Methods for evaluating mTOR activity, e.g., by inhibition of P70 S6 kinase, are discussed herein. The dose is insufficient to result in complete immune suppression but is sufficient to enhance the immune response. In an embodiment, the low, immune enhancing, dose of mTOR inhibitor results in a decrease in the number of PD-1 positive T cells and/or an increase in the number of PD-1 negative T cells, or an increase in the ratio of PD-1 negative T cells/PD-1 positive T cells. In an embodiment, the low, immune enhancing, dose of mTOR inhibitor results in an increase in the number of naive T cells. In an embodiment, the low, immune enhancing, dose of mTOR inhibitor results in one or more of the following:
[0298] an increase in the expression of one or more of the following markers: CD62L^{high} CD12^{high}, CD27⁺, and BCL2, e.g., on memory T cells, e.g., memory T cell precursors;
[0299] a decrease in the expression of KLRG1, e.g., on memory T cells, e.g., memory T cell precursors; and
[0300] an increase in the number of memory T cell precursors, e.g., cells with any one or combination of the following characteristics: increased CD62L^{high} increased CD127^{high}, increased CD27⁺, decreased KLRG1, and increased BCL2;
[0301] wherein any of the changes described above occurs, e.g., at least transiently, e.g., as compared to a non-treated subject.

[0302] “Refractory” as used herein refers to a disease, e.g., cancer, that does not respond to a treatment. In embodiments, a refractory cancer can be resistant to a treatment before or at the beginning of the treatment. In other embodiments, the refractory cancer can become resistant during a treatment. A refractory cancer is also called a resistant cancer.

[0303] “Relapsed” as used herein refers to the return of a disease (e.g., cancer) or the signs and symptoms of a disease such as cancer after a period of improvement, e.g., after prior treatment of a therapy, e.g., cancer therapy

[0304] Ranges: throughout this disclosure, various aspects of the invention can be presented in a range format. It should be understood that the description in range format is merely for convenience and brevity and should not be construed as an inflexible limitation on the scope of the invention. Accordingly, the description of a range should be considered to have specifically disclosed all the possible subranges as well as individual numerical values within that range. For example, description of a range such as from 1 to 6 should be considered to have specifically disclosed subranges such as from 1 to 3, from 1 to 4, from 1 to 5, from 2 to 4, from 2 to 6, from 3 to 6 etc., as well as individual numbers within that range, for example, 1, 2, 2.7, 3, 4, 5, 5.3, and 6. As another example, a range such as 95-99% identity, includes something with 95%, 96%, 97%, 98% or 99% identity, and includes subranges such as 96-99%, 96-98%, 96-97%, 97-99%, 97-98% and 98-99% identity. This applies regardless of the breadth of the range.

### SHP Inhibitor Molecules

[0305] Provided herein are compositions of matter and methods of use for the treatment of a disease such as cancer using immune effector cells (e.g., T cells, NK cells) engineered with CARs and SHP inhibitor molecules, e.g., SHP inhibitor polypeptides disclosed herein.

[0306] In one aspect, immune effector cells comprising CARs and SHP inhibitor molecules exhibit increased killing of tumor cells, increased cytokine release, and increased tumor infiltration in vitro and in vivo. Assays for said properties are described herein, e.g., in the Examples herein.

[0307] Many inhibitory receptors (IRs) are purported to signal, at least in part, via the enzyme SHP-1 (Thaventhiran T, Sethu S, Yeang H X, Laith A H, Hamdam J, Sathish J G. J Clin Cell Immunol 2012; S12:1-12) (see FIG. 1). The invention pertains, at least in part, on the discovery that interference with SHP, e.g., SHP-1 signaling, can provide an advantageous way to block one or more IRs simultaneously.

[0308] SHP1, known by its two names, Src homology region 2 domain-containing phosphatase-1 and tyrosine-protein phosphatase non-receptor type 6, is an enzyme that is encoded by the PTPN6 gene in humans (Plutzky J, Neel B G, Rosenberg R D, Eddy R L, Byers M G, Jani-Sait S, et al. Genomics 1992 July; 13(3):869-72). SHP1 is a member of the protein tyrosine phosphatase (PTP) family, a family known to regulate various cellular processes (e.g. cell growth, differentiation, mitosis, oncogenic transformation) by removing key phosphorylated tyrosine residues. SHP2, known by its names protein-tyrosine phosphatase 1D (PTP-1D), protein-tyrosine phosphatase 2C (PTP-2C), or tyrosine-protein phosphatase non-receptor type 11 (PTPN11), is a paralogue phosphatase which possesses a similar structure to SHP1, and is widely expressed in most tissues (Qu C K. Cell Res2000 December; 10(4):279-88).

[0309] SHP1 is expressed primarily in hematopoietic cells where it regulates multiple signaling pathways. One example is the regulation of TCR (T cell receptor) signaling in T cells by SHP1 and SHP2. (Lorenz U. Immunol Rev 2009 March; 228(1):342-59; Hebeisen M, Baitsch L, Presotto D, Baumgaertner P, Romero P, Michielin O, et al. J Clin Invest March; 123(3):1044-56). SHP1 terminates TCR signaling at multiple points along the path of TCR signaling events. For example, it inhibits phosphorylation of CD3z and other adapter proteins (e.g. LAT, linker for activation of T cells) and association of signal-amplifying molecules like Zap70 (Zeta-chain-associated protein kinase 70), and dephosphorylates Lck (lymphocyte-specific protein tyrosine kinase) a key component that assists in signaling from the TCR complex (FIG. 2) (Fawcett V C, Lorenz U. J Immunol 2005 Mar. 1; 174(5):2849-59; Sankarshanan M, Ma Z, Iype T, Lorenz U. J Immunol 2007 Jul. 1; 179(1):483-90).

[0310] The effects of SHP1 blockade/interference using T cells from genetically engineered mice have been studied, demonstrating increased anti-tumor activity of SHP1(−/−) mouse effector T cells (Stromnes I M, Fowler C, Casamina C C, Georgopolos C M, McAfee M S, Schmitt T M, et al. J Immunol August 15; 189(4):1812-25). The ability to enhance the anti-tumor activity of human T cells using chemical inhibitors like sodium stibogluconate (SSG), an injectable medicine used to treat leshmaniasis, to block SHP1 activity has also been studied (Hebeisen et al.). However, pharmacologic block will likely be limited by side effects, due to the widespread expression and activity of SHP1.

[0311] Detailed molecular information about how SHP1 works was utilized. The catalytic site of SHP1 is normally occupied by the N-terminus of its SH2 domain (SH2-N). This self binding keeps SHP1 in its non-catalytic conformation (Poole A W, Jones M L. A SHPing tale: perspectives on the regulation of SHP-1 and SHP-2 tyrosine phosphatases by the C-terminal tail. Cell Signal2005 November; 17(11):1323-32). SH2-N releases from the catalytic domain upon recognition of phosphorylated tyrosine motifs (pTyr) on immunoreceptor tyrosine-based inhibition motifs (ITIMs), which are located on the cytoplasmic tails of IRs like PD1 (Yaffe M B. Nat Rev Mol Cell Biol 2002 March; 3(3):177-86; Hampel K, Kaufhold I, Zacharias M, Bohmer F D, Imhof D. ChemMedChem 2006 August; 1(8):869-77) (FIG. 7). Once the SH2-domain binds to the ITIM, the catalytic activity of SHP1 is “released”.

### SHP Inhibitor Polypeptide

[0312] In one aspect, the compositions, methods and uses described herein comprise an SHP inhibitor polypeptide, e.g., an SHP-1 inhibitor polypeptide or an SHP-2 inhibitor polypeptide, e.g., an SHP inhibitor polypeptide that reduces the expression and/or function of SHP, e.g., an SHP inhibitor polypeptide that reduces the function of SHP. In one aspect, the SHP inhibitor polypeptide is a dominant negative mutant of the N-terminal region of SHP-1 or SHP-2.

[0313] The invention pertains, at least in part, to a novel strategy to improve the activity, persistence, and tumoricidal activity of adoptively transferred T cells (as illustrated with CAR-expressing T cells) by cloning in a modified transgene that interrupts the catalytic activity of the phosphatase SHP-1 in T cells. The transgene encodes a small peptide based on the N-terminal region of SHP-1 (N—SH2). The region of N—SH2 that binds to phosphorylated tyrosine motifs (ITIMs) was mutated to produce the peptide called R30K. Co-expression of a CAR and N-SH2-R30K in T cells results in increased killing of tumor cells both in vitro and in vivo, using a mesothelin-targeted CAR as an example.

[0314] Full length wild-type SHP-1 sequence is provided below as SEQ ID NO: 1:

```
                10 20 30 40
MVRWFHRDLS GLDAETLLKG RGVHGSFLAR PSRKNQGDFS
                50 60 70 80
LSVRVGDQVT HIRIQNSGDF YDLYGGEKFA TLTELVEYYT
                90 100 110 120
QQQGVLQDRD GTIIHLKYPL NCSDPTSERW YHGHMSGGQA
              130 140 150 160
ETLLQAKGEP WTFLVRESLS QPGDFVLSVL SDQPKAGPGS
              170 180 190 200
PLRVTHIKVM CEGGRYTVGG LETFDSLTDL VEHFKKTGIE
              210 220 230 240
EASGAFVYLR QPYYATRVNA ADIENRVLEL NKKQESEDTA
              250 260 270 280
KAGFWEEFES LQKQEVKNLH QRLEGQRPEN KGKNRYKNIL
              290 300 310 320
PFDHSRVILQ GRDSNIPGSD YINANYIKNQ LLGPDENAKT
              330 340 350 360
YIASQGCLEA TVNDFWQMAW QENSRVIVMT TREVEKGRNK
              370 380 390 400
CVPYWPEVGM QRAYGPYSVT NCGEHDTTEY KLRTLQVSPL
              410 420 430 440
DNGDLIREIW HYQYLSWPDH GVPSEPGGVL SFLDQINQRQ
              450 460 470 480
ESLPHAGPII VHCSAGIGRT GTIIVIDMLM ENISTKGLDC
              490 500 510 520
DIDIQKTIQM VRAQRSGMVQ TEAQYKFIYV AIAQFIETTK
              530 540 550 560
KKLEVLQSQK GQESEYGNIT YPPAMKNAHA KASRTSSKHK
              570 580 590
EDVYENLHTK NKREEKVKKQ RSADKEKSKG SLKRK
```

[0315] With respect to SEQ ID NO: 1, in some embodiments, amino acids 4-100 constitute the N-terminal SH2 domain (also called the SH2 1 domain); amino acids 110-213 constitute the C-terminal SH2 domain (also called the SH2 2 domain), and amino acids 244-515 constitute the catalytic domain, e.g., the phosphatase domain.

[0316] Full length wild-type SHP-2 sequence is provided below as SEQ ID NO: 2:

```
                10 20 30 40
MTSRRWFHPN ITGVEAENLL LTRGVDGSFL ARPSKSNPGD
                50 60 70 80
FTLSVRRNGA VTHIKIQNTG DYYDLYGGEK FATLAELVQY
                90 100 110 120
YMEHHGQLKE KNGDVIELKY PLNCADPTSE RWFHGHLSGK
              130 140 150 160
EAEKLLTEKG KHGSFLVRES QSHPGDFVLS VRTGDDKGES
              170 180 190 200
NDGKSKVTHV MIRCQELKYD VGGGERFDSL TDLVEHYKKN
              210 220 230 240
PMVETLGTVL QLKQPLNTTR INAAEIESRV RELSKLAETT
              250 260 270 280
DKVKQGFWEE FETLQQQECK LLYSRKEGQR QENKNKNRYK
              290 300 310 320
NILPFDHTRV VLHDGDPNEP VSDYINANII MPEFETKCNN
              330 340 350 360
SKPKKSYIAT QGCLQNTVND FWRMVFQENS RVIVMTTKEV
              370 380 390 400
ERGKSKCVKY WPDEYALKEY GVMRVRNVKE SAAHDYTLRE
              410 420 430 440
LKLSKVGQAL LQGNTERTVW QYHFRTWPDH GVPSDPGGVL
              450 460 470 480
DFLEEVHHKQ ESIMDAGPVV VHCSAGIGRT GTFIVIDILI
              490 500 510 520
DIIREKGVDC DIDVPKTIQM VRSQRSGMVQ TEAQYRFIYM
              530 540 550 560
AVQHYIETLQ RRIEEEQKSK RKGHEYTNIK YSLADQTSGD
              570 580 590
QSPLPPCTPT PPCAEMREDS ARVYENVGLM QQQKSFR
```

[0317] With respect to SEQ ID NO: 2, in some embodiments, amino acids 6-102 constitute the N-terminal SH2 domain (also called the SH2 1 domain); amino acids 112-216 constitute the C-terminal SH2 domain (also called the SH2 1 domain), and amino acids 247-521 constitute the catalytic domain, e.g., the phosphatase domain.

[0318] A 100 amino acid N-terminal SHP-1 fragment, wherein amino acid 30 can be any amino acid, is provided below as SEQ ID NO: 3:

```
                10 20 30 40
MVRWFHRDLS GLDAETLLKG RGVHGSFLAX PSRKNQGDFS
                50 60 70 80
LSVRVGDQVT HIRIQNSGDF YDLYGGEKFA TLTELVEYYT
                90 100
QQQGVLQDRD GTIIHLKYPL
```

[0319] The amino acid sequence of a wild-type SHP-1 SH2-N peptide is provided below and in FIG. 8 as SEQ ID NO: 40:

MVRWFHRDLSGLDAETLLKGRGVHGSFLARPSRKNQGDFSLSVRVGDQVT
HIRIQNSGDFYDLYGGEKFATLTELVEYYTQQQGVLQDRDGTIIHLKYPL

[0320] The amino acid sequence of an SHP-1 SH2-N R30K peptide is provided below and in FIG. 8 as SEQ ID NO: 41:

MVRWFHRDLSGLDAETLLKGRGVHGSFLAKPSRKNQGDFSLSVRVGDQVT
HIRIQNSGDFYDLYGGEKFATLTELVEYYTQQQGVLQDRDGTIIHLKYPL

[0321] The amino acid sequence of an SHP-1 SH2-N R30H peptide is provided below as SEQ ID NO: 42:

MVRWFHRDLSGLDAETLLKGRGVHGSFLAHPSRKNQGDFSLSVRVGDQVT
HIRIQNSGDFYDLYGGEKFATLTELVEYYTQQQGVLQDRDGTIIHLKYPL

[0322] A 102 amino acid N-terminal SHP-2 fragment, wherein amino acid 32 can be any amino acid, is provided below as SEQ ID NO: 4:

```
                10 20 30 40
MTSRRWFHPN ITGVEAENLL LTRGVDGSFL AXPSKSNPGD
                50 60 70 80
FTLSVRRNGA VTHIKIQNTG DYYDLYGGEK FATLAELVQY
                90 100 110 120
YMEHHGQLKE KNGDVIELKY PL
              130 140 150
```

[0323] The amino acid sequence of a wild-type SHP-2 SH2-N peptide is provided below as SEQ ID NO: 43:

MTSRRWFHPNITGVEAENLLLTRGVDGSFLARPSKSNPGDFTLSVRRNGA
VTHIKIQNTGDYYDLYGGEKFATLAELVQYYMEHHGQLKEKNGDVIELKY
PL

[0324] The amino acid sequence of an SHP-2 SH2-N R32K peptide is provided below as SEQ ID NO: 44:

MTSRRWFHPNITGVEAENLLLTRGVDGSFLAKPSKSNPGDFTLSVRRNGA
VTHIKIQNTGDYYDLYGGEKFATLAELVQYYMEHHGQLKEKNGDVIELKY
PL

[0325] The amino acid sequence of an SHP-2 SH2-N R32H peptide is provided below as SEQ ID NO: 45:

MTSRRWFHPNITGVEAENLLLTRGVDGSFLAHPSKSNPGDFTLSVRRNGA
VTHIKIQNTGDYYDLYGGEKFATLAELVQYYMEHHGQLKEKNGDVIELKY
PL

[0326] An alternative N-terminal SHP-2 fragment, wherein amino acid 32 can be any amino acid, is provided below as SEQ ID NO: 46:

MTSRRWFHPNITGVEAENLLLTRGVDGSFLAXSKSNPGDFTLSVRRNGA
VTHIKIQNTGDYYDLYGGEKFATLAELVQYYMEHHGQLKEKNGDVIELK
YPL

[0327] In one aspect, the invention provides a number of chimeric antigen receptors (CAR) comprising an antigen binding domain (e.g., antibody or antibody fragment, TCR or TCR fragment) engineered for specific binding to a tumor antigen, e.g., a tumor antigen described herein. In one aspect, the invention provides an immune effector cell (e.g., T cell, NK cell) engineered to express a CAR and an SHP inhibitor polypeptide, wherein the engineered immune effector cell exhibits an anticancer property. In one aspect, a cell is transformed with the CAR and the SHP inhibitor polypeptide, and the CAR is expressed on the cell surface. In some embodiments, the cell (e.g., T cell, NK cell) is transduced with a viral vector encoding a CAR and a SHP inhibitor polypeptide. In some embodiments, the viral vector is a retroviral vector. In some embodiments, the viral vector is a lentiviral vector. In some such embodiments, the cell may stably express the CAR and SHP inhibitor polypeptide. In another embodiment, the cell (e.g., T cell, NK cell) is transfected with a nucleic acid, e.g., mRNA, cDNA, DNA, encoding a CAR and a SHP inhibitor polypeptide. In some such embodiments, the cell may transiently express the CAR and SHP inhibitor polypeptide. In some embodiments, the SHP inhibitor polypeptide comprises or consists of the amino acid sequence of SEQ ID NO: 3, 4, 41, 42, 44, or 45 (or a sequence at least about 85%, 90%, 95%, 99% or more identical thereto, and/or having one, two, three or more substitutions, insertions, deletions, or modifications).

[0328] In one aspect, immune effector cells engineered to co-express a CAR and an SHP inhibitor polypeptide can be administered to a patient in conjunction with one or more additional SHP inhibitory agent(s). In embodiments, the additional SHP inhibitory agent(s) may be selected from small molecules, nucleic acids, or polypeptides. In an embodiment, the additional SHP inhibitory agent is sodium stibogluconate (SSG). In an embodiment, the additional SHP inhibitory agent(s) is administered simultaneously with the engineered immune effector cells. In an embodiment, the additional SHP inhibitory agent(s) is administered a time period X prior to or after the engineered immune effector cells are administered, where time period X is 1, 2, 3, 4, 5, 6, 7, 8, 9, 10, 11, 12, 13, 14, 15, 16, 17, 18, 19, 20, 21, 22, 23, or 24 hours, or 1, 2, 3, 4, 5, 6, 7, 8, 9, 10, 11, 12, 13, 14, 15, 16, 17, 18, 19, 20, 21, 22, 23, 24, 25, 26, 27, 28, 29, or 30 days.

### Gene Editing Systems Targeting SHP

[0329] In one aspect, gene editing systems can be used as inhibitors of SHP. Also contemplated by the present invention are the uses of a nucleic acid molecule encoding one or more components of a gene editing system targeting SHP.

### CRISPR Cas9 Gene Editing Systems

[0330] Naturally-occurring CRISPR/Cas systems are found in approximately 40% of sequenced eubacteria genomes and 90% of sequenced archaea. Grissa et al. (2007) BMC Bioinformatics 8: 172. This system is a type of prokaryotic immune system that confers resistance to foreign genetic elements such as plasmids and phages and provides a form of acquired immunity. Barrangou et al. (2007) Science 315: 1709-1712; Marragini et al. (2008) Science 322: 1843-1845.

[0331] The CRISPR/Cas system has been modified for use in gene editing (silencing, enhancing or changing specific genes) in eukaryotes such as mice or primates. Wiedenheft et al. (2012) Nature 482: 331-8. This is accomplished by, for example, introducing into the eukaryotic cell a plasmid containing a specifically designed CRISPR and one or more appropriate Cas. In other embodiments, the reagents can also be introduced into the cell directly, e.g., gRNA molecule and Cas protein (e.g., precomplexed as a ribonuclear protein complex (RNP)).

[0332] The CRISPR sequence, sometimes called a CRISPR locus, comprises alternating repeats and spacers. In a naturally-occurring CRISPR, the spacers usually comprise sequences foreign to the bacterium such as a plasmid or phage sequence. In an exemplary CRISPR/Cas system targeting SHP1 or SHP2, the spacers are derived from the gene sequence of SHP1 or SHP2, or a sequence of its regulatory elements. In other exemplary embodiments, an engineered CRISPR/Cas system selected for SHP1 or SHP2 may be utilized which comprises a gRNA molecule comprising a targeting domain sequence complementary to a target sequence of a SHP1 or SHP2 gene or regulatory element, and comprising a Cas molecule, for example a Cas9 molecule such as S. pyogenes Cas9.

[0333] RNA from the CRISPR locus is constitutively expressed and processed into small RNAs. These comprise a spacer flanked by a repeat sequence. The RNAs guide other Cas proteins to silence exogenous genetic elements at the RNA or DNA level. Horvath et al. (2010) Science 327: 167-170; Makarova et al. (2006) Biology Direct 1: 7. The spacers thus serve as templates for RNA molecules, analogously to siRNAs. Pennisi (2013) Science 341: 833-836.

[0334] As these naturally occur in many different types of bacteria, the exact arrangements of the CRISPR and structure, function and number of Cas genes and their product differ somewhat from species to species. Haft et al. (2005) PLoS Comput. Biol. 1: e60; Kunin et al. (2007) Genome Biol. 8: R61; Mojica et al. (2005) J. Mol. Evol. 60: 174-182; Bolotin et al. (2005) Microbiol. 151: 2551-2561; Pourcel et al. (2005) Microbiol. 151: 653-663; and Stem et al. (2010) Trends. Genet. 28: 335-340. For example, the Cse (Cas subtype, E. coli) proteins (e.g., CasA) form a functional complex, Cascade, that processes CRISPR RNA transcripts into spacer-repeat units that Cascade retains. Brouns et al. (2008) Science 321: 960-964. In other prokaryotes, Cas6 processes the CRISPR transcript. The CRISPR-based phage inactivation in E. coli requires Cascade and Cas3, but not Cas1 or Cas2. The Cmr (Cas RAMP module) proteins in Pyrococcus furiosus and other prokaryotes form a functional complex with small CRISPR RNAs that recognizes and cleaves complementary target RNAs. A simpler CRISPR system relies on the protein Cas9, which is a nuclease with two active cutting sites, one for each strand of the double helix. Combining Cas9 and modified CRISPR locus RNA can be used in a system for gene editing. Pennisi (2013) Science 341: 833-836.

[0335] The CRISPR/Cas system can thus be used to modify, e.g., delete one or more nucleic acids, e.g., a gene encoding SHP1 or SHP2, or a regulatory element of a gene encoding SHP1 or SHP2, or introduce a premature stop which thus decreases expression of a functional SHP1 or SHP2. The CRISPR/Cas system can alternatively be used like RNA interference, turning off a gene encoding SHP1 or SHP2 in a reversible fashion. In a mammalian cell, for example, the RNA can guide the Cas protein to a promoter of a gene encoding SHP1 or SHP2, sterically blocking RNA polymerases.

[0336] CRISPR/Cas systems for gene editing in eukaryotic cells typically involve (1) a guide RNA molecule (gRNA) comprising a targeting domain (which is capable of hybridizing to the genomic DNA target sequence), and sequence which is capable of binding to a Cas, e.g., Cas9 enzyme, and (2) a Cas, e.g., Cas9, protein. The targeting domain and the sequence which is capable of binding to a Cas, e.g., Cas9 enzyme, may be disposed on the same or different molecules. If disposed on different molecules, each includes a hybridization domain which allows the molecules to associate, e.g., through hybridization.

[0337] Artificial CRISPR/Cas systems can be generated which inhibit a gene encoding SHP1 or SHP2, using technology known in the art, e.g., that are described in WO2017093969, herein incorporated by reference in its entirety.

[0338] Other artificial CRISPR/Cas systems that are known in the art may also be generated which inhibit a gene encoding SHP1 or SHP2, e.g., that described in U.S. Publication No. 20140068797, WO2015/048577, Cong (2013) Science 339: 819-823, Tsai (2014) Nature Biotechnol., 32:6 569-576, U.S. Pat. Nos. 8,871,445; 8,865,406; 8,795,965; 8,771,945; and 8,697,359, the contents of which are hereby incorporated by reference in their entirety. Such systems can be generated which inhibit a gene encoding SHP1 or SHP2, by, for example, engineering a CRISPR/Cas system to include a gRNA molecule comprising a targeting domain that hybridizes to a sequence of a target gene, e.g., a gene encoding SHP1 or SHP2. In embodiments, the gRNA comprises a targeting domain which is fully complementarity to 15-25 nucleotides, e.g., 20 nucleotides, of a target gene, e.g., a gene encoding SHP1 or SHP2. In embodiments, the 15-25 nucleotides, e.g., 20 nucleotides, of a target gene, e.g., a gene encoding SHP1 or SHP2, are disposed immediately 5′ to a protospacer adjacent motif (PAM) sequence recognized by the Cas protein of the CRISPR/Cas system (e.g., where the system comprises a S. pyogenes Cas9 protein, the PAM sequence comprises NGG, where N can be any of A, T, G or C).

[0339] In an embodiment, the CRISPR/Cas system of the present invention comprises Cas9, e.g., S. pyogenes Cas9, and a gRNA comprising a targeting domain which hybridizes to a sequence of a gene encoding SHP1 or SHP2. In an embodiment, the CRISPR/Cas system comprises a nucleic acid encoding a gRNA specific for a gene encoding SHP1 or SHP2, and a nucleic acid encoding a Cas protein, e.g., Cas9, e.g., S. pyogenes Cas9. In an embodiment, the CRISPR/Cas system comprises a gRNA specific for a gene encoding SHP1 or SHP2, and a nucleic acid encoding a Cas protein, e.g., Cas9, e.g., S. pyogenes Cas9.

[0340] In one embodiment, the gene editing system is a CRISPR system comprising one or more gRNA molecules targeting a nucleic acid molecule encoding SHP2 or a regulatory element of a nucleic acid molecule encoding SHP2, e.g., a gene encoding SHP2 or a regulatory element of a gene encoding SHP2. In one embodiment, the gene editing system is a CRISPR system comprising one or more gRNA molecules targeting the exon of SHP2. In one embodiment, the gene editing system is a CRISPR system comprising one or more gRNA molecules targeting a genomic location provided in column 4 of Table 19. In one embodiment, the gene editing system is a CRISPR system comprising one or more gRNA molecules targeting a genomic target sequence provided in column 6 of Table 19, or a portion thereof.

[0341] In one embodiment, the gene editing system is a CRISPR system comprising one or more gRNA molecules. In one embodiment, the gRNA molecule comprises a tracr and a crRNA, wherein the crRNA comprises a targeting domain that is complementary with a target sequence of SHP2, e.g., human SHP2. In one embodiment, the targeting domain comprises any nucleotide sequence provided in column 5 of Table 19. In one embodiment, the targeting domain comprises or consists of 17, 18, 19, 20, 21, 22, 23, or 24 consecutive nucleic acids of any nucleotide sequence provided in column 5 of Table 19. In one embodiment, the 17, 18, 19, 20, 21, 22, 23, or 24 consecutive nucleic acids of any nucleotide sequence provided in column 5 of Table 19 are the 17, 18, 19, 20, 21, 22, 23, or 24 consecutive nucleic acids disposed at the 3′ end of the recited nucleotide sequence provided in column 5 of Table 19. In one embodiment, the 17, 18, 19, 20, 21, 22, 23, or 24 consecutive nucleic acids of any nucleotide sequence provided in column 5 of Table 19 are the 17, 18, 19, 20, 21, 22, 23, or 24 consecutive nucleic acids disposed at the 5′ end of the recited nucleotide sequence provided in column 5 of Table 19. In one embodiment, the 17, 18, 19, 20, 21, 22, 23, or 24 consecutive nucleic acids of any nucleotide sequence provided in column 5 of Table 19 do not comprise either the 5′ or 3′ nucleic acid of the recited nucleotide sequence provided in column 5 of Table 19.

TABLE 19
gRNAs targeting SHP2

| | Column 2 | | Column 4 | Column 5 | | Column 6 | |
|---|---|---|---|---|---|---|---|
| Column 1 | Target | Column 3 | Genomic | gRNA targeting | SEQ | Genomic target | SEQ ID |
| Target | region | Strand | location (hg38) | domain sequence | ID NO | sequence | NO |
| PTPN11 | EXON | + | chr12: 112418712-112418737 | GCGCGCAGCU | 1946 | GCGCGCAGC | 2698 |
| | | | | CACACCUGGC | | TCACACCTG | |
| | | | | GGCCG | | GCGGCCG | |
| PTPN11 | EXON | + | chr12: 112418720-112418745 | CUCACACCUG | 1947 | CTCACACCT | 2699 |
| | | | | GCGGCCGCGG | | GGCGGCCGC | |
| | | | | UUUCC | | GGTTTCC | |
| PTPN11 | EXON | + | chr12: 112418723-112418748 | ACACCUGGCG | 1948 | ACACCTGGC | 2700 |
| | | | | GCCGCGGUU | | GGCCGCGGT | |
| | | | | UCCAGG | | TTCCAGG | |
| PTPN11 | EXON | + | chr12: 112418731-112418756 | CGGCCGCGGU | 1949 | CGGCCGCGG | 2701 |
| | | | | UUCCAGGAG | | TTTCCAGGA | |
| | | | | GAAGCA | | GGAAGCA | |
| PTPN11 | EXON | + | chr12: 112418740-112418765 | UUUCCAGGA | 1950 | TTTCCAGGA | 2702 |
| | | | | GGAAGCAAG | | GGAAGCAAG | |
| | | | | GAUGCUU | | GATGCTT | |
| PTPN11 | EXON | + | chr12: 112418753-112418778 | GCAAGGAUG | 1951 | GCAAGGATG | 2703 |
| | | | | CUUUGGACA | | CTTTGGACA | |
| | | | | CUGUGCG | | CTGTGCG | |
| PTPN11 | EXON | + | chr12: 112418764-112418789 | UUGGACACU | 1952 | TTGGACACT | 2704 |
| | | | | GUGCGUGGC | | GTGCGTGGC | |
| | | | | GCCUCCG | | GCCTCCG | |
| PTPN11 | EXON | + | chr12: 112418787-112418812 | CGCGGAGCCC | 1953 | CGCGGAGCC | 2705 |
| | | | | CCGCGCUGCC | | CCCGCGCTG | |
| | | | | AUUCC | | CCATTCC | |
| PTPN11 | EXON | + | chr12: 112418798-112418823 | CGCGCUGCCA | 1954 | CGCGCTGCC | 2706 |
| | | | | UUCCCGGCCG | | ATTCCCGGC | |
| | | | | UCGCU | | CGTCGCT | |
| PTPN11 | EXON | + | chr12: 112418812-112418837 | CGGCCGUCGC | 1955 | CGGCCGTCG | 2707 |
| | | | | UCGGUCCUCC | | CTCGGTCCT | |
| | | | | GCUGA | | CCGCTGA | |
| PTPN11 | EXON | + | chr12: 112418813-112418838 | GGCCGUCGCU | 1956 | GGCCGTCGC | 2708 |
| | | | | CGGUCCUCCG | | TCGGTCCTC | |
| | | | | CUGAC | | CGCTGAC | |
| PTPN11 | EXON | + | chr12: 112418820-112418845 | GCUCGGUCCU | 1957 | GCTCGGTCC | 2709 |
| | | | | CCGCUGACGG | | TCCGCTGAC | |
| | | | | GAAGC | | GGGAAGC | |
| PTPN11 | EXON | + | chr12: 112418826-112418851 | UCCUCCGCUG | 1958 | TCCTCCGCT | 2710 |
| | | | | ACGGGAAGC | | GACGGGAAG | |
| | | | | AGGAAG | | CAGGAAG | |
| PTPN11 | EXON | + | chr12: 112418829-112418854 | UCCGCUGACG | 1959 | TCCGCTGAC | 2711 |
| | | | | GGAAGCAGG | | GGGAAGCAG | |
| | | | | AAGUGG | | GAAGTGG | |
| PTPN11 | EXON | + | chr12: 112418832-112418857 | GCUGACGGG | 1960 | GCTGACGGG | 2712 |
| | | | | AAGCAGGAA | | AAGCAGGAA | |
| | | | | GUGGCGG | | GTGGCGG | |
| PTPN11 | EXON | + | chr12: 112418833-112418858 | CUGACGGGA | 1961 | CTGACGGGA | 2713 |
| | | | | AGCAGGAAG | | AGCAGGAAG | |
| | | | | UGGCGGC | | TGGCGGC | |
| PTPN11 | EXON | + | chr12: 112418845-112418870 | AGGAAGUGG | 1962 | AGGAAGTGG | 2714 |
| | | | | CGGCGGGCG | | CGGCGGGCG | |
| | | | | UCGCGAG | | TCGCGAG | |
| PTPN11 | EXON | + | chr12: 112418856-112418881 | GCGGGCGUC | 1963 | GCGGGCGTC | 2715 |
| | | | | GCGAGCGGU | | GCGAGCGGT | |
| | | | | GACAUCA | | GACATCA | |
| PTPN11 | EXON | + | chr12: 112418857-112418882 | CGGGCGUCGC | 1964 | CGGGCGTCG | 2716 |
| | | | | GAGCGGUGA | | CGAGCGGTG | |
| | | | | CAUCAC | | ACATCAC | |
| PTPN11 | EXON | + | chr12: 112418858-112418883 | GGGCGUCGC | 1965 | GGGCGTCGC | 2717 |
| | | | | GAGCGGUGA | | GAGCGGTGA | |
| | | | | CAUCACG | | CATCACG | |
| PTPN11 | EXON | + | chr12: 112418859-112418884 | GGCGUCGCG | 1966 | GGCGTCGCG | 2718 |
| | | | | AGCGGUGAC | | AGCGGTGAC | |
| | | | | AUCACGG | | ATCACGG | |
| PTPN11 | EXON | + | chr12: 112418865-112418890 | GCGAGCGGU | 1967 | GCGAGCGGT | 2719 |
| | | | | GACAUCACG | | GACATCACG | |
| | | | | GGGGCGA | | GGGGCGA | |
| PTPN11 | EXON | + | chr12: 112418868-112418893 | AGCGGUGAC | 1968 | AGCGGTGAC | 2720 |
| | | | | AUCACGGGG | | ATCACGGGG | |
| | | | | GCGACGG | | GCGACGG | |
| PTPN11 | EXON | + | chr12: 112418874-112418899 | GACAUCACG | 1969 | GACATCACG | 2721 |
| | | | | GGGGCGACG | | GGGGCGACG | |
| | | | | GCGGCGA | | GCGGCGA | |
| PTPN11 | EXON | + | chr12: 112418875-112418900 | ACAUCACGG | 1970 | ACATCACGG | 2722 |
| | | | | GGGCGACGG | | GGGCGACGG | |
| | | | | CGGCGAA | | CGGCGAA | |
| PTPN11 | EXON | + | chr12: 112418878-112418903 | UCACGGGGG | 1971 | TCACGGGGG | 2723 |
| | | | | CGACGGCGGC | | CGACGGCGG | |
| | | | | GAAGGG | | CGAAGGG | |
| PTPN11 | EXON | + | chr12: 112418879-112418904 | CACGGGGGC | 1972 | CACGGGGGC | 2724 |
| | | | | GACGGCGGC | | GACGGCGGC | |
| | | | | GAAGGGC | | GAAGGGC | |
| PTPN11 | EXON | + | chr12: 112418880-112418905 | ACGGGGGCG | 1973 | ACGGGGGCG | 2725 |
| | | | | ACGGCGGCG | | ACGGCGGCG | |
| | | | | AAGGGCG | | AAGGGCG | |
| PTPN11 | EXON | + | chr12: 112418881-112418906 | CGGGGGCGA | 1974 | CGGGGGCGA | 2726 |
| | | | | CGGCGGCGA | | CGGCGGCGA | |
| | | | | AGGGCGG | | AGGGCGG | |
| PTPN11 | EXON | + | chr12: 112418884-112418909 | GGGCGACGG | 1975 | GGGCGACGG | 2727 |
| | | | | CGGCGAAGG | | CGGCGAAGG | |
| | | | | GCGGGGG | | GCGGGGG | |
| PTPN11 | EXON | + | chr12: 112418887-112418912 | CGACGGCGGC | 1976 | CGACGGCGG | 2728 |
| | | | | GAAGGGCGG | | CGAAGGGCG | |
| | | | | GGGCGG | | GGGGCGG | |
| PTPN11 | EXON | + | chr12: 112418890-112418915 | CGGCGGCGA | 1977 | CGGCGGCGA | 2729 |
| | | | | AGGGCGGGG | | AGGGCGGGG | |
| | | | | GCGGAGG | | GCGGAGG | |
| PTPN11 | EXON | + | chr12: 112418900-112418925 | GGGCGGGGG | 1978 | GGGCGGGGG | 2730 |
| | | | | CGGAGGAGG | | CGGAGGAGG | |
| | | | | AGCGAGC | | AGCGAGC | |
| PTPN11 | EXON | + | chr12: 112418901-112418926 | GGCGGGGGC | 1979 | GGCGGGGGC | 2731 |
| | | | | GGAGGAGGA | | GGAGGAGGA | |
| | | | | GCGAGCC | | GCGAGCC | |
| PTPN11 | EXON | + | chr12: 112418905-112418930 | GGGGCGGAG | 1980 | GGGGCGGAG | 2732 |
| | | | | GAGGAGCGA | | GAGGAGCGA | |
| | | | | GCCGGGC | | GCCGGGC | |
| PTPN11 | EXON | + | chr12: 112418906-112418931 | GGGCGGAGG | 1981 | GGGCGGAGG | 2733 |
| | | | | AGGAGCGAG | | AGGAGCGAG | |
| | | | | CCGGGCC | | CCGGGCC | |
| PTPN11 | EXON | + | chr12: 112418907-112418932 | GGCGGAGGA | 1982 | GGCGGAGGA | 2734 |
| | | | | GGAGCGAGC | | GGAGCGAGC | |
| | | | | CGGGCCG | | CGGGCCG | |
| PTPN11 | EXON | + | chr12: 112418908-112418933 | GCGGAGGAG | 1983 | GCGGAGGAG | 2735 |
| | | | | GAGCGAGCC | | GAGCGAGCC | |
| | | | | GGGCCGG | | GGGCCGG | |
| PTPN11 | EXON | + | chr12: 112418909-112418934 | CGGAGGAGG | 1984 | CGGAGGAGG | 2736 |
| | | | | AGCGAGCCG | | AGCGAGCCG | |
| | | | | GGCCGGG | | GGCCGGG | |
| PTPN11 | EXON | + | chr12: 112418927-112418952 | GGCCGGGGG | 1985 | GGCCGGGGG | 2737 |
| | | | | GCAGCUGCAC | | GCAGCTGCA | |
| | | | | AGUCUC | | CAGTCTC | |
| PTPN11 | EXON | + | chr12: 112418928-112418953 | GCCGGGGGG | 1986 | GCCGGGGGG | 2738 |
| | | | | CAGCUGCACA | | CAGCTGCAC | |
| | | | | GUCUCC | | AGTCTCC | |
| PTPN11 | EXON | + | chr12: 112418937-112418962 | CAGCUGCACA | 1987 | CAGCTGCAC | 2739 |
| | | | | GUCUCCGGG | | AGTCTCCGG | |
| | | | | AUCCCC | | GATCCCC | |
| PTPN11 | EXON | + | chr12: 112418942-112418967 | GCACAGUCUC | 1988 | GCACAGTCT | 2740 |
| | | | | CGGGAUCCCC | | CCGGGATCC | |
| | | | | AGGCC | | CCAGGCC | |
| PTPN11 | EXON | + | chr12: 112418945-112418970 | CAGUCUCCGG | 1989 | CAGTCTCCG | 2741 |
| | | | | GAUCCCCAGG | | GGATCCCCA | |
| | | | | CCUGG | | GGCCTGG | |
| PTPN11 | EXON | + | chr12: 112418946-112418971 | AGUCUCCGG | 1990 | AGTCTCCGG | 2742 |
| | | | | GAUCCCCAGG | | GATCCCCAG | |
| | | | | CCUGGA | | GCCTGGA | |
| PTPN11 | EXON | + | chr12: 112418947-112418972 | GUCUCCGGG | 1991 | GTCTCCGGG | 2743 |
| | | | | AUCCCCAGGC | | ATCCCCAGG | |
| | | | | CUGGAG | | CCTGGAG | |
| PTPN11 | EXON | + | chr12: 112418948-112418973 | UCUCCGGGA | 1992 | TCTCCGGGA | 2744 |
| | | | | UCCCCAGGCC | | TCCCCAGGC | |
| | | | | UGGAGG | | CTGGAGG | |
| PTPN11 | EXON | + | chr12: 112418949-112418974 | CUCCGGGAUC | 1993 | CTCCGGGAT | 2745 |
| | | | | CCCAGGCCUG | | CCCCAGGCC | |
| | | | | GAGGG | | TGGAGGG | |
| PTPN11 | EXON | + | chr12: 112418960-112418985 | CCAGGCCUGG | 1994 | CCAGGCCTG | 2746 |
| | | | | AGGGGGGUC | | GAGGGGGGT | |
| | | | | UGUGCG | | CTGTGCG | |
| PTPN11 | EXON | + | chr12: 112418964-112418989 | GCCUGGAGG | 1995 | GCCTGGAGG | 2747 |
| | | | | GGGGUCUGU | | GGGGTCTGT | |
| | | | | GCGCGGC | | GCGCGGC | |
| PTPN11 | EXON | + | chr12: 112418968-112418993 | GGAGGGGGG | 1996 | GGAGGGGGG | 2748 |
| | | | | UCUGUGCGC | | TCTGTGCGC | |
| | | | | GGCCGGC | | GGCCGGC | |
| PTPN11 | EXON | + | chr12: 112418985-112419010 | CGGCCGGCUG | 1997 | CGGCCGGCT | 2749 |
| | | | | GCUCUGCCCC | | GGCTCTGCC | |
| | | | | GCGUC | | CCGCGTC | |
| PTPN11 | EXON | + | chr12: 112418995-112419020 | GCUCUGCCCC | 1998 | GCTCTGCCC | 2750 |
| | | | | GCGUCCGGUC | | CGCGTCCGG | |
| | | | | CCGAG | | TCCCGAG | |
| PTPN11 | EXON | + | chr12: 112418996-112419021 | CUCUGCCCCG | 1999 | CTCTGCCCC | 2751 |
| | | | | CGUCCGGUCC | | GCGTCCGGT | |
| | | | | CGAGC | | CCCGAGC | |
| PTPN11 | EXON | + | chr12: 112419006-112419031 | CGUCCGGUCC | 2000 | CGTCCGGTC | 2752 |
| | | | | CGAGCGGGCC | | CCGAGCGGG | |
| | | | | UCCCU | | CCTCCCT | |
| PTPN11 | EXON | + | chr12: 112419007-112419032 | GUCCGGUCCC | 2001 | GTCCGGTCC | 2753 |
| | | | | GAGCGGGCC | | CGAGCGGGC | |
| | | | | UCCCUC | | CTCCCTC | |
| PTPN11 | EXON | + | chr12: 112419034-112419059 | GCCAGCCCGA | 2002 | GCCAGCCCG | 2754 |
| | | | | UGUGACCGA | | ATGTGACCG | |
| | | | | GCCCAG | | AGCCCAG | |
| PTPN11 | EXON | + | chr12: 112419047-112419072 | GACCGAGCCC | 2003 | GACCGAGCC | 2755 |
| | | | | AGCGGAGCC | | CAGCGGAGC | |
| | | | | UGAGCA | | CTGAGCA | |
| PTPN11 | EXON | + | chr12: 112419052-112419077 | AGCCCAGCGG | 2004 | AGCCCAGCG | 2756 |
| | | | | AGCCUGAGC | | GAGCCTGAG | |
| | | | | AAGGAG | | CAAGGAG | |
| PTPN11 | EXON | + | chr12: 112419053-112419078 | GCCCAGCGGA | 2005 | GCCCAGCGG | 2757 |
| | | | | GCCUGAGCA | | AGCCTGAGC | |
| | | | | AGGAGC | | AAGGAGC | |
| PTPN11 | EXON | + | chr12: 112419063-112419088 | GCCUGAGCA | 2006 | GCCTGAGCA | 2758 |
| | | | | AGGAGCGGG | | AGGAGCGGG | |
| | | | | UCCGUCG | | TCCGTCG | |
| PTPN11 | EXON | + | chr12: 112419069-112419094 | GCAAGGAGC | 2007 | GCAAGGAGC | 2759 |
| | | | | GGGUCCGUC | | GGGTCCGTC | |
| | | | | GCGGAGC | | GCGGAGC | |
| PTPN11 | EXON | + | chr12: 112419072-112419097 | AGGAGCGGG | 2008 | AGGAGCGGG | 2760 |
| | | | | UCCGUCGCGG | | TCCGTCGCG | |
| | | | | AGCCGG | | GAGCCGG | |
| PTPN11 | EXON | + | chr12: 112419073-112419098 | GGAGCGGGU | 2009 | GGAGCGGGT | 2761 |
| | | | | CCGUCGCGGA | | CCGTCGCGG | |
| | | | | GCCGGA | | AGCCGGA | |
| PTPN11 | EXON | + | chr12: 112419076-112419101 | GCGGGUCCG | 2010 | GCGGGTCCG | 2762 |
| | | | | UCGCGGAGCC | | TCGCGGAGC | |
| | | | | GGAGGG | | CGGAGGG | |
| PTPN11 | EXON | + | chr12: 112419077-112419102 | CGGGUCCGUC | 2011 | CGGGTCCGT | 2763 |
| | | | | GCGGAGCCG | | CGCGGAGCC | |
| | | | | GAGGGC | | GGAGGGC | |
| PTPN11 | EXON | + | chr12: 112419080-112419105 | GUCCGUCGCG | 2012 | GTCCGTCGC | 2764 |
| | | | | GAGCCGGAG | | GGAGCCGGA | |
| | | | | GGCGGG | | GGGCGGG | |
| PTPN11 | EXON | + | chr12: 112419095-112419120 | GGAGGGCGG | 2013 | GGAGGGCGG | 2765 |
| | | | | GAGGAACAU | | GAGGAACAT | |
| | | | | GACAUCG | | GACATCG | |
| PTPN11 | EXON | + | chr12: 112419098-112419123 | GGGCGGGAG | 2014 | GGGCGGGAG | 2766 |
| | | | | GAACAUGAC | | GAACATGAC | |
| | | | | AUCGCGG | | ATCGCGG | |
| PTPN11 | EXON | + | chr12: 112419103-112419128 | GGAGGAACA | 2015 | GGAGGAACA | 2767 |
| | | | | UGACAUCGC | | TGACATCGC | |
| | | | | GGAGGUG | | GGAGGTG | |
| PTPN11 | EXON | + | chr12: 112419113-112419138 | GACAUCGCG | 2016 | GACATCGCG | 2768 |
| | | | | GAGGUGAGG | | GAGGTGAGG | |
| | | | | AGCCCCG | | AGCCCCG | |
| PTPN11 | EXON | + | chr12: 112419114-112419139 | ACAUCGCGG | 2017 | ACATCGCGG | 2769 |
| | | | | AGGUGAGGA | | AGGTGAGGA | |
| | | | | GCCCCGA | | GCCCCGA | |
| PTPN11 | EXON | + | chr12: 112419115-112419140 | CAUCGCGGA | 2018 | CATCGCGGA | 2770 |
| | | | | GGUGAGGAG | | GGTGAGGAG | |
| | | | | CCCCGAG | | CCCCGAG | |
| PTPN11 | EXON | − | chr12: 112418729-112418754 | CUUCCUCCUG | 2019 | CTTCCTCCTG | 2771 |
| | | | | GAAACCGCG | | GAAACCGCG | |
| | | | | GCCGCC | | GCCGCC | |
| PTPN11 | EXON | − | chr12: 112418737-112418762 | CAUCCUUGCU | 2020 | CATCCTTGCT | 2772 |
| | | | | UCCUCCUGGA | | TCCTCCTGG | |
| | | | | AACCG | | AAACCG | |
| PTPN11 | EXON | − | chr12: 112418746-112418771 | UGUCCAAAG | 2021 | TGTCCAAAG | 2773 |
| | | | | CAUCCUUGCU | | CATCCTTGCT | |
| | | | | UCCUCC | | TCCTCC | |
| PTPN11 | EXON | − | chr12: 112418786-112418811 | GAAUGGCAG | 2022 | GAATGGCAG | 2774 |
| | | | | CGCGGGGGC | | CGCGGGGGC | |
| | | | | UCCGCGG | | TCCGCGG | |
| PTPN11 | EXON | − | chr12: 112418789-112418814 | CGGGAAUGG | 2023 | CGGGAATGG | 2775 |
| | | | | CAGCGCGGG | | CAGCGCGGG | |
| | | | | GGCUCCG | | GGCTCCG | |
| PTPN11 | EXON | − | chr12: 112418797-112418822 | GCGACGGCCG | 2024 | GCGACGGCC | 2776 |
| | | | | GGAAUGGCA | | GGGAATGGC | |
| | | | | GCGCGG | | AGCGCGG | |
| PTPN11 | EXON | − | chr12: 112418798-112418823 | AGCGACGGCC | 2025 | AGCGACGGC | 2777 |
| | | | | GGGAAUGGC | | CGGGAATGG | |
| | | | | AGCGCG | | CAGCGCG | |
| PTPN11 | EXON | − | chr12: 112418799-112418824 | GAGCGACGG | 2026 | GAGCGACGG | 2778 |
| | | | | CCGGGAAUG | | CCGGGAATG | |
| | | | | GCAGCGC | | GCAGCGC | |
| PTPN11 | EXON | − | chr12: 112418800-112418825 | CGAGCGACG | 2027 | CGAGCGACG | 2779 |
| | | | | GCCGGGAAU | | GCCGGGAAT | |
| | | | | GGCAGCG | | GGCAGCG | |
| PTPN11 | EXON | − | chr12: 112418808-112418833 | CGGAGGACC | 2028 | CGGAGGACC | 2780 |
| | | | | GAGCGACGG | | GAGCGACGG | |
| | | | | CCGGGAA | | CCGGGAA | |
| PTPN11 | EXON | − | chr12: 112418813-112418838 | GUCAGCGGA | 2029 | GTCAGCGGA | 2781 |
| | | | | GGACCGAGC | | GGACCGAGC | |
| | | | | GACGGCC | | GACGGCC | |
| PTPN11 | EXON | − | chr12: 112418814-112418839 | CGUCAGCGG | 2030 | CGTCAGCGG | 2782 |
| | | | | AGGACCGAG | | AGGACCGAG | |
| | | | | CGACGGC | | CGACGGC | |
| PTPN11 | EXON | − | chr12: 112418818-112418843 | UUCCCGUCAG | 2031 | TTCCCGTCA | 2783 |
| | | | | CGGAGGACC | | GCGGAGGAC | |
| | | | | GAGCGA | | CGAGCGA | |
| PTPN11 | EXON | − | chr12: 112418830-112418855 | CGGACUUCCU | 2032 | CGGACTTCC | 2784 |
| | | | | GCUUCCCGUC | | TGCTTCCCGT | |
| | | | | AGCGG | | CAGCGG | |
| PTPN11 | EXON | − | chr12: 112418833-112418858 | CGGCGGACU | 2033 | CGGCGGACT | 2785 |
| | | | | UCCUGCUUCC | | TCCTGCTTCC | |
| | | | | CGUCAG | | CGTCAG | |
| PTPN11 | EXON | − | chr12: 112418927-112418952 | GAGACUGUG | 2034 | GAGACTGTG | 2786 |
| | | | | CAGCUGCGG | | CAGCTGCGG | |
| | | | | GGGCCGG | | GGGCCGG | |
| PTPN11 | EXON | − | chr12: 112418932-112418957 | UCCCGGAGAC | 2035 | TCCCGGAGA | 2787 |
| | | | | UGUGCAGCU | | CTGTGCAGC | |
| | | | | GCGGGG | | TGCGGGG | |
| PTPN11 | EXON | − | chr12: 112418954-112418979 | GACCCCCCUC | 2036 | GACCCCCCT | 2788 |
| | | | | CAGGCCUGG | | CCAGGCCTG | |
| | | | | GGAUCC | | GGGATCC | |
| PTPN11 | EXON | − | chr12: 112418961-112418986 | GCGCACAGAC | 2037 | GCGCACAGA | 2789 |
| | | | | CCCCCUCCAG | | CCCCCCTCC | |
| | | | | GCCUG | | AGGCCTG | |
| PTPN11 | EXON | − | chr12: 112418962-112418987 | CGCGCACAGA | 2038 | CGCGCACAG | 2790 |
| | | | | CCCCCCUCCA | | ACCCCCCTC | |
| | | | | GGCCU | | CAGGCCT | |
| PTPN11 | EXON | − | chr12: 112418963-112418988 | CCGCGCACAG | 2039 | CCGCGCACA | 2791 |
| | | | | ACCCCCCUCC | | GACCCCCCT | |
| | | | | AGGCC | | CCAGGCC | |
| PTPN11 | EXON | − | chr12: 112418968-112418993 | GCCGGCCGCG | 2040 | GCCGGCCGC | 2792 |
| | | | | CACAGACCCC | | GCACAGACC | |
| | | | | CCUCC | | CCCCTCC | |
| PTPN11 | EXON | − | chr12: 112418991-112419016 | GGACCGGAC | 2041 | GGACCGGAC | 2793 |
| | | | | GCGGGGCAG | | GCGGGGCAG | |
| | | | | AGCCAGC | | AGCCAGC | |
| PTPN11 | EXON | − | chr12: 112419004-112419029 | GGAGGCCCGC | 2042 | GGAGGCCCG | 2794 |
| | | | | UCGGGACCG | | CTCGGGACC | |
| | | | | GACGCG | | GGACGCG | |
| PTPN11 | EXON | − | chr12: 112419005-112419030 | GGGAGGCCC | 2043 | GGGAGGCCC | 2795 |
| | | | | GCUCGGGACC | | GCTCGGGAC | |
| | | | | GGACGC | | CGGACGC | |
| PTPN11 | EXON | − | chr12: 112419006-112419031 | AGGGAGGCC | 2044 | AGGGAGGCC | 2796 |
| | | | | CGCUCGGGAC | | CGCTCGGGA | |
| | | | | CGGACG | | CCGGACG | |
| PTPN11 | EXON | − | chr12: 112419012-112419037 | GGCCCGAGG | 2045 | GGCCCGAGG | 2797 |
| | | | | GAGGCCCGCU | | GAGGCCCGC | |
| | | | | CGGGAC | | TCGGGAC | |
| PTPN11 | EXON | − | chr12: 112419017-112419042 | GGGCUGGCCC | 2046 | GGGCTGGCC | 2798 |
| | | | | GAGGGAGGC | | CGAGGGAGG | |
| | | | | CCGCUC | | CCCGCTC | |
| PTPN11 | EXON | − | chr12: 112419018-112419043 | CGGGCUGGCC | 2047 | CGGGCTGGC | 2799 |
| | | | | CGAGGGAGG | | CCGAGGGAG | |
| | | | | CCCGCU | | GCCCGCT | |
| PTPN11 | EXON | − | chr12: 112419027-112419052 | CGGUCACAUC | 2048 | CGGTCACAT | 2800 |
| | | | | GGGCUGGCCC | | CGGGCTGGC | |
| | | | | GAGGG | | CCGAGGG | |
| PTPN11 | EXON | − | chr12: 112419030-112419055 | GCUCGGUCAC | 2049 | GCTCGGTCA | 2801 |
| | | | | AUCGGGCUG | | CATCGGGCT | |
| | | | | GCCCGA | | GGCCCGA | |
| PTPN11 | EXON | − | chr12: 112419031-112419056 | GGCUCGGUC | 2050 | GGCTCGGTC | 2802 |
| | | | | ACAUCGGGC | | ACATCGGGC | |
| | | | | UGGCCCG | | TGGCCCG | |
| PTPN11 | EXON | − | chr12: 112419038-112419063 | UCCGCUGGGC | 2051 | TCCGCTGGG | 2803 |
| | | | | UCGGUCACA | | CTCGGTCAC | |
| | | | | UCGGGC | | ATCGGGC | |
| PTPN11 | EXON | − | chr12: 112419042-112419067 | AGGCUCCGCU | 2052 | AGGCTCCGC | 2804 |
| | | | | GGGCUCGGU | | TGGGCTCGG | |
| | | | | CACAUC | | TCACATC | |
| PTPN11 | EXON | − | chr12: 112419043-112419068 | CAGGCUCCGC | 2053 | CAGGCTCCG | 2805 |
| | | | | UGGGCUCGG | | CTGGGCTCG | |
| | | | | UCACAU | | GTCACAT | |
| PTPN11 | EXON | − | chr12: 112419052-112419077 | CUCCUUGCUC | 2054 | CTCCTTGCTC | 2806 |
| | | | | AGGCUCCGCU | | AGGCTCCGC | |
| | | | | GGGCU | | TGGGCT | |
| PTPN11 | EXON | − | chr12: 112419057-112419082 | ACCCGCUCCU | 2055 | ACCCGCTCC | 2807 |
| | | | | UGCUCAGGC | | TTGCTCAGG | |
| | | | | UCCGCU | | CTCCGCT | |
| PTPN11 | EXON | − | chr12: 112419058-112419083 | GACCCGCUCC | 2056 | GACCCGCTC | 2808 |
| | | | | UUGCUCAGG | | CTTGCTCAG | |
| | | | | CUCCGC | | GCTCCGC | |
| PTPN11 | EXON | − | chr12: 112419067-112419092 | UCCGCGACGG | 2057 | TCCGCGACG | 2809 |
| | | | | ACCCGCUCCU | | GACCCGCTC | |
| | | | | UGCUC | | CTTGCTC | |
| PTPN11 | EXON | − | chr12: 112419085-112419110 | UUCCUCCCGC | 2058 | TTCCTCCCGC | 2810 |
| | | | | CCUCCGGCUC | | CCTCCGGCT | |
| | | | | CGCGA | | CCGCGA | |
| PTPN11 | EXON | − | chr12: 112419096-112419121 | GCGAUGUCA | 2059 | GCGATGTCA | 2811 |
| | | | | UGUUCCUCCC | | TGTTCCTCCC | |
| | | | | GCCCUC | | GCCCTC | |
| PTPN11 | EXON | + | chr12: 112446271-112446296 | UAAGAUGGU | 2060 | TAAGATGGT | 2812 |
| | | | | UUCACCCAAA | | TTCACCCAA | |
| | | | | UAUCAC | | ATATCAC | |
| PTPN11 | EXON | + | chr12: 112446276-112446301 | UGGUUUCAC | 2061 | TGGTTTCAC | 2813 |
| | | | | CCAAAUAUC | | CCAAATATC | |
| | | | | ACUGGUG | | ACTGGTG | |
| PTPN11 | EXON | + | chr12: 112446279-112446304 | UUUCACCCAA | 2062 | TTTCACCCA | 2814 |
| | | | | AUAUCACUG | | AATATCACT | |
| | | | | GUGUGG | | GGTGTGG | |
| PTPN11 | EXON | + | chr12: 112446304-112446329 | AGGCAGAAA | 2063 | AGGCAGAAA | 2815 |
| | | | | ACCUACUGU | | ACCTACTGT | |
| | | | | UGACAAG | | TGACAAG | |
| PTPN11 | EXON | + | chr12: 112446313-112446338 | ACCUACUGU | 2064 | ACCTACTGT | 2816 |
| | | | | UGACAAGAG | | TGACAAGAG | |
| | | | | GAGUUGA | | GAGTTGA | |
| PTPN11 | EXON | + | chr12: 112446324-112446349 | ACAAGAGGA | 2065 | ACAAGAGGA | 2817 |
| | | | | GUUGAUGGC | | GTTGATGGC | |
| | | | | AGUUUUU | | AGTTTTT | |
| PTPN11 | EXON | + | chr12: 112446329-112446354 | AGGAGUUGA | 2066 | AGGAGTTGA | 2818 |
| | | | | UGGCAGUUU | | TGGCAGTTT | |
| | | | | UUUGGCA | | TTTGGCA | |
| PTPN11 | EXON | + | chr12: 112446349-112446374 | UGGCAAGGC | 2067 | TGGCAAGGC | 2819 |
| | | | | CUAGUAAAA | | CTAGTAAAA | |
| | | | | GUAACCC | | GTAACCC | |
| PTPN11 | EXON | + | chr12: 112446371-112446396 | CCCUGGAGAC | 2068 | CCCTGGAGA | 2820 |
| | | | | UUCACACUU | | CTTCACACTT | |
| | | | | UCCGUU | | TCCGTT | |
| PTPN11 | EXON | + | chr12: 112446379-112446404 | ACUUCACACU | 2069 | ACTTCACAC | 2821 |
| | | | | UUCCGUUAG | | TTTCCGTTAG | |
| | | | | GUAAGU | | GTAAGT | |
| PTPN11 | EXON | − | chr12: 112446287-112446312 | UUCUGCCUCC | 2070 | TTCTGCCTCC | 2822 |
| | | | | ACACCAGUG | | ACACCAGTG | |
| | | | | AUAUUU | | ATATTT | |
| PTPN11 | EXON | − | chr12: 112446288-112446313 | UUUCUGCCUC | 2071 | TTTCTGCCTC | 2823 |
| | | | | CACACCAGUG | | CACACCAGT | |
| | | | | AUAUU | | GATATT | |
| PTPN11 | EXON | − | chr12: 112446317-112446342 | GCCAUCAACU | 2072 | GCCATCAAC | 2824 |
| | | | | CCUCUUGUCA | | TCCTCTTGTC | |
| | | | | ACAGU | | AACAGT | |
| PTPN11 | EXON | − | chr12: 112446360-112446385 | UGAAGUCUC | 2073 | TGAAGTCTC | 2825 |
| | | | | CAGGGUUAC | | CAGGGTTAC | |
| | | | | UUUUACU | | TTTTACT | |
| PTPN11 | EXON | − | chr12: 112446374-112446399 | CCUAACGGA | 2074 | CCTAACGGA | 2826 |
| | | | | AAGUGUGAA | | AAGTGTGAA | |
| | | | | GUCUCCA | | GTCTCCA | |
| PTPN11 | EXON | − | chr12: 112446375-112446400 | ACCUAACGG | 2075 | ACCTAACGG | 2827 |
| | | | | AAAGUGUGA | | AAAGTGTGA | |
| | | | | AGUCUCC | | AGTCTCC | |
| PTPN11 | EXON | + | chr12: 112450298-112450323 | UUCCAAUGG | 2076 | TTCCAATGG | 2828 |
| | | | | ACUAUUUUA | | ACTATTTTA | |
| | | | | GAAGAAA | | GAAGAAA | |
| PTPN11 | EXON | + | chr12: 112450331-112450356 | UCACCCACAU | 2077 | TCACCCACA | 2829 |
| | | | | CAAGAUUCA | | TCAAGATTC | |
| | | | | GAACAC | | AGAACAC | |
| PTPN11 | EXON | + | chr12: 112450352-112450377 | ACACUGGUG | 2078 | ACACTGGTG | 2830 |
| | | | | AUUACUAUG | | ATTACTATG | |
| | | | | ACCUGUA | | ACCTGTA | |
| PTPN11 | EXON | + | chr12: 112450355-112450380 | CUGGUGAUU | 2079 | CTGGTGATT | 2831 |
| | | | | ACUAUGACC | | ACTATGACC | |
| | | | | UGUAUGG | | TGTATGG | |
| PTPN11 | EXON | + | chr12: 112450356-112450381 | UGGUGAUUA | 2080 | TGGTGATTA | 2832 |
| | | | | CUAUGACCU | | CTATGACCT | |
| | | | | GUAUGGA | | GTATGGA | |
| PTPN11 | EXON | + | chr12: 112450357-112450382 | GGUGAUUAC | 2081 | GGTGATTAC | 2833 |
| | | | | UAUGACCUG | | TATGACCTG | |
| | | | | UAUGGAG | | TATGGAG | |
| PTPN11 | EXON | + | chr12: 112450375-112450400 | UAUGGAGGG | 2082 | TATGGAGGG | 2834 |
| | | | | GAGAAAUUU | | GAGAAATTT | |
| | | | | GCCACUU | | GCCACTT | |
| PTPN11 | EXON | + | chr12: 112450384-112450409 | GAGAAAUUU | 2083 | GAGAAATTT | 2835 |
| | | | | GCCACUUUG | | GCCACTTTG | |
| | | | | GCUGAGU | | GCTGAGT | |
| PTPN11 | EXON | + | chr12: 112450399-112450424 | UUGGCUGAG | 2084 | TTGGCTGAG | 2836 |
| | | | | UUGGUCCAG | | TTGGTCCAG | |
| | | | | UAUUACA | | TATTACA | |
| PTPN11 | EXON | + | chr12: 112450409-112450434 | UGGUCCAGU | 2085 | TGGTCCAGT | 2837 |
| | | | | AUUACAUGG | | ATTACATGG | |
| | | | | AACAUCA | | AACATCA | |
| PTPN11 | EXON | + | chr12: 112450410-112450435 | GGUCCAGUA | 2086 | GGTCCAGTA | 2838 |
| | | | | UUACAUGGA | | TTACATGGA | |
| | | | | ACAUCAC | | ACATCAC | |
| PTPN11 | EXON | + | chr12: 112450430-112450455 | AUCACGGGC | 2087 | ATCACGGGC | 2839 |
| | | | | AAUUAAAAG | | AATTAAAAG | |
| | | | | AGAAGAA | | AGAAGAA | |
| PTPN11 | EXON | + | chr12: 112450485-112450510 | GAACUGUGC | 2088 | GAACTGTGC | 2840 |
| | | | | AGAUCCUACC | | AGATCCTAC | |
| | | | | UCUGAA | | CTCTGAA | |
| PTPN11 | EXON | − | chr12: 112450303-112450328 | CUCCAUUUCU | 2089 | CTCCATTTCT | 2841 |
| | | | | UCUAAAAUA | | TCTAAAATA | |
| | | | | GUCCAU | | GTCCAT | |
| PTPN11 | EXON | − | chr12: 112450337-112450362 | UCACCAGUG | 2090 | TCACCAGTG | 2842 |
| | | | | UUCUGAAUC | | TTCTGAATCT | |
| | | | | UUGAUGU | | TGATGT | |
| PTPN11 | EXON | − | chr12: 112450338-112450363 | AUCACCAGU | 2091 | ATCACCAGT | 2843 |
| | | | | GUUCUGAAU | | GTTCTGAAT | |
| | | | | CUUGAUG | | CTTGATG | |
| PTPN11 | EXON | − | chr12: 112450374-112450399 | AGUGGCAAA | 2092 | AGTGGCAAA | 2844 |
| | | | | UUUCUCCCCU | | TTTCTCCCCT | |
| | | | | CCAUAC | | CCATAC | |
| PTPN11 | EXON | − | chr12: 112450397-112450422 | UAAUACUGG | 2093 | TAATACTGG | 2845 |
| | | | | ACCAACUCAG | | ACCAACTCA | |
| | | | | CCAAAG | | GCCAAAG | |
| PTPN11 | EXON | − | chr12: 112450416-112450441 | UUGCCCGUG | 2094 | TTGCCCGTG | 2846 |
| | | | | AUGUUCCAU | | ATGTTCCAT | |
| | | | | GUAAUAC | | GTAATAC | |
| PTPN11 | EXON | − | chr12: 112450483-112450508 | CAGAGGUAG | 2095 | CAGAGGTAG | 2847 |
| | | | | GAUCUGCAC | | GATCTGCAC | |
| | | | | AGUUCAG | | AGTTCAG | |
| PTPN11 | EXON | − | chr12: 112450501-112450526 | AAAAUGUUA | 2096 | AAAATGTTA | 2848 |
| | | | | CUGACCUUUC | | CTGACCTTTC | |
| | | | | AGAGGU | | AGAGGT | |
| PTPN11 | EXON | − | chr12: 112450505-112450530 | CACUAAAAU | 2097 | CACTAAAAT | 2849 |
| | | | | GUUACUGAC | | GTTACTGAC | |
| | | | | CUUUCAG | | CTTTCAG | |
| PTPN11 | EXON | + | chr12: 112453178-112453203 | UUUUUAAAA | 2098 | TTTTTAAAA | 2850 |
| | | | | ACUUUAGGU | | ACTTTAGGT | |
| | | | | GGUUUCA | | GGTTTCA | |
| PTPN11 | EXON | + | chr12: 112453190-112453215 | UUAGGUGGU | 2099 | TTAGGTGGT | 2851 |
| | | | | UUCAUGGAC | | TTCATGGAC | |
| | | | | AUCUCUC | | ATCTCTC | |
| PTPN11 | EXON | + | chr12: 112453191-112453216 | UAGGUGGUU | 2100 | TAGGTGGTT | 2852 |
| | | | | UCAUGGACA | | TCATGGACA | |
| | | | | UCUCUCU | | TCTCTCT | |
| PTPN11 | EXON | + | chr12: 112453223-112453248 | AAGCAGAGA | 2101 | AAGCAGAGA | 2853 |
| | | | | AAUUAUUAA | | AATTATTAA | |
| | | | | CUGAAAA | | CTGAAAA | |
| PTPN11 | EXON | + | chr12: 112453232-112453257 | AAUUAUUAA | 2102 | AATTATTAA | 2854 |
| | | | | CUGAAAAAG | | CTGAAAAAG | |
| | | | | GAAAACA | | GAAAACA | |
| PTPN11 | EXON | + | chr12: 112453268-112453293 | UUGUACGAG | 2103 | TTGTACGAG | 2855 |
| | | | | AGAGCCAGA | | AGAGCCAGA | |
| | | | | GCCACCC | | GCCACCC | |
| PTPN11 | EXON | + | chr12: 112453295-112453320 | GAGAUUUUG | 2104 | GAGATTTTG | 2856 |
| | | | | UUCUUUCUG | | TTCTTTCTGT | |
| | | | | UGCGCAC | | GCGCAC | |
| PTPN11 | EXON | + | chr12: 112453307-112453332 | UUUCUGUGC | 2105 | TTTCTGTGCG | 2857 |
| | | | | GCACUGGUG | | CACTGGTGA | |
| | | | | AUGACAA | | TGACAA | |
| PTPN11 | EXON | + | chr12: 112453308-112453333 | UUCUGUGCG | 2106 | TTCTGTGCG | 2858 |
| | | | | CACUGGUGA | | CACTGGTGA | |
| | | | | UGACAAA | | TGACAAA | |
| PTPN11 | EXON | + | chr12: 112453309-112453334 | UCUGUGCGC | 2107 | TCTGTGCGC | 2859 |
| | | | | ACUGGUGAU | | ACTGGTGAT | |
| | | | | GACAAAG | | GACAAAG | |
| PTPN11 | EXON | + | chr12: 112453322-112453347 | GUGAUGACA | 2108 | GTGATGACA | 2860 |
| | | | | AAGGGGAGA | | AAGGGGAGA | |
| | | | | GCAAUGA | | GCAATGA | |
| PTPN11 | EXON | + | chr12: 112453360-112453385 | GUGACCCAU | 2109 | GTGACCCAT | 2861 |
| | | | | GUUAUGAUU | | GTTATGATT | |
| | | | | CGCUGUC | | CGCTGTC | |
| PTPN11 | EXON | − | chr12: 112453284-112453309 | AAGAACAAA | 2110 | AAGAACAAA | 2862 |
| | | | | AUCUCCAGG | | ATCTCCAGG | |
| | | | | GUGGCUC | | GTGGCTC | |
| PTPN11 | EXON | − | chr12: 112453290-112453315 | CACAGAAAG | 2111 | CACAGAAAG | 2863 |
| | | | | AACAAAAUC | | AACAAAATC | |
| | | | | UCCAGGG | | TCCAGGG | |
| PTPN11 | EXON | − | chr12: 112453293-112453318 | GCGCACAGA | 2112 | GCGCACAGA | 2864 |
| | | | | AAGAACAAA | | AAGAACAAA | |
| | | | | AUCUCCA | | ATCTCCA | |
| PTPN11 | EXON | − | chr12: 112453294-112453319 | UGCGCACAG | 2113 | TGCGCACAG | 2865 |
| | | | | AAAGAACAA | | AAAGAACAA | |
| | | | | AAUCUCC | | AATCTCC | |
| PTPN11 | EXON | − | chr12: 112453367-112453392 | TTTACCTGA | 2114 | UUUACCUGA | 2866 |
| | | | | CAGCGAAUC | | CAGCGAATC | |
| | | | | AUAACAU | | ATAACAT | |
| PTPN11 | EXON | − | chr12: 112453368-112453393 | AUUUACCUG | 2115 | ATTTACCTG | 2867 |
| | | | | ACAGCGAAU | | ACAGCGAAT | |
| | | | | CAUAACA | | CATAACA | |
| PTPN11 | EXON | + | chr12: 112454555-112454580 | CUUGAAAGG | 2116 | CTTGAAAGG | 2868 |
| | | | | AACUGAAAU | | AACTGAAAT | |
| | | | | ACGACGU | | ACGACGT | |
| PTPN11 | EXON | + | chr12: 112454558-112454583 | GAAAGGAAC | 2117 | GAAAGGAAC | 2869 |
| | | | | UGAAAUACG | | TGAAATACG | |
| | | | | ACGUUGG | | ACGTTGG | |
| PTPN11 | EXON | + | chr12: 112454561-112454586 | AGGAACUGA | 2118 | AGGAACTGA | 2870 |
| | | | | AAUACGACG | | AATACGACG | |
| | | | | UUGGUGG | | TTGGTGG | |
| PTPN11 | EXON | + | chr12: 112454568-112454593 | GAAAUACGA | 2119 | GAAATACGA | 2871 |
| | | | | CGUUGGUGG | | CGTTGGTGG | |
| | | | | AGGAGAA | | AGGAGAA | |
| PTPN11 | EXON | + | chr12: 112454593-112454618 | CGGUUUGAU | 2120 | CGGTTTGAT | 2872 |
| | | | | UCUUUGACA | | TCTTTGACA | |
| | | | | GAUCUUG | | GATCTTG | |
| PTPN11 | EXON | + | chr12: 112454617-112454642 | GUGGAACAU | 2121 | GTGGAACAT | 2873 |
| | | | | UAUAAGAAG | | TATAAGAAG | |
| | | | | AAUCCUA | | AATCCTA | |
| PTPN11 | EXON | + | chr12: 112454620-112454645 | GAACAUUAU | 2122 | GAACATTAT | 2874 |
| | | | | AAGAAGAAU | | AAGAAGAAT | |
| | | | | CCUAUGG | | CCTATGG | |
| PTPN11 | EXON | + | chr12: 112454629-112454654 | AAGAAGAAU | 2123 | AAGAAGAAT | 2875 |
| | | | | CCUAUGGUG | | CCTATGGTG | |
| | | | | GAAACAU | | GAAACAT | |
| PTPN11 | EXON | + | chr12: 112454630-112454655 | AGAAGAAUC | 2124 | AGAAGAATC | 2876 |
| | | | | CUAUGGUGG | | CTATGGTGG | |
| | | | | AAACAUU | | AAACATT | |
| PTPN11 | EXON | + | chr12: 112454653-112454678 | UUGGGUACA | 2125 | TTGGGTACA | 2877 |
| | | | | GUACUACAA | | GTACTACAA | |
| | | | | CUCAAGC | | CTCAAGC | |
| PTPN11 | EXON | + | chr12: 112454665-112454690 | CUACAACUCA | 2126 | CTACAACTC | 2878 |
| | | | | AGCAGGUGA | | AAGCAGGTG | |
| | | | | GCAGAU | | AGCAGAT | |
| PTPN11 | EXON | − | chr12: 112454641-112454666 | GUACUGUAC | 2127 | GTACTGTAC | 2879 |
| | | | | CCAAUGUUU | | CCAATGTTT | |
| | | | | CCACCAU | | CCACCAT | |
| PTPN11 | EXON | + | chr12: 112456016-112456041 | CUGAGACCAC | 2128 | CTGAGACCA | 2880 |
| | | | | AGAUAAAGU | | CAGATAAAG | |
| | | | | CAAACA | | TCAAACA | |
| PTPN11 | EXON | + | chr12: 112456023-112456048 | CACAGAUAA | 2129 | CACAGATAA | 2881 |
| | | | | AGUCAAACA | | AGTCAAACA | |
| | | | | AGGCUUU | | AGGCTTT | |
| PTPN11 | EXON | + | chr12: 112456024-112456049 | ACAGAUAAA | 2130 | ACAGATAAA | 2882 |
| | | | | GUCAAACAA | | GTCAAACAA | |
| | | | | GGCUUUU | | GGCTTTT | |
| PTPN11 | EXON | + | chr12: 112456036-112456061 | AAACAAGGC | 2131 | AAACAAGGC | 2883 |
| | | | | UUUUGGGAA | | TTTTGGGAA | |
| | | | | GAAUUUG | | GAATTTG | |
| PTPN11 | EXON | − | chr12: 112455952-112455977 | CAGCAUUUA | 2132 | CAGCATTTA | 2884 |
| | | | | UACGAGUCG | | TACGAGTCG | |
| | | | | UGUUAAG | | TGTTAAG | |
| PTPN11 | EXON | − | chr12: 112455953-112455978 | GCAGCAUUU | 2133 | GCAGCATTT | 2885 |
| | | | | AUACGAGUC | | ATACGAGTC | |
| | | | | GUGUUAA | | GTGTTAA | |
| PTPN11 | EXON | − | chr12: 112455954-112455979 | AGCAGCAUU | 2134 | AGCAGCATT | 2886 |
| | | | | UAUACGAGU | | TATACGAGT | |
| | | | | CGUGUUA | | CGTGTTA | |
| PTPN11 | EXON | − | chr12: 112456025-112456050 | CAAAAGCCU | 2135 | CAAAAGCCT | 2887 |
| | | | | UGUUUGACU | | TGTTTGACTT | |
| | | | | UUAUCUG | | TATCTG | |
| PTPN11 | EXON | + | chr12: 112472931-112472956 | CUUUCUUUCC | 2136 | CTTTCTTTCC | 2888 |
| | | | | AGACACUAC | | AGACACTAC | |
| | | | | AACAAC | | AACAAC | |
| PTPN11 | EXON | + | chr12: 112472961-112472986 | UGCAAACUU | 2137 | TGCAAACTT | 2889 |
| | | | | CUCUACAGCC | | CTCTACAGC | |
| | | | | GAAAAG | | CGAAAAG | |
| PTPN11 | EXON | + | chr12: 112472962-112472987 | GCAAACUUC | 2138 | GCAAACTTC | 2890 |
| | | | | UCUACAGCCG | | TCTACAGCC | |
| | | | | AAAAGA | | GAAAAGA | |
| PTPN11 | EXON | + | chr12: 112472969-112472994 | UCUCUACAGC | 2139 | TCTCTACAG | 2891 |
| | | | | CGAAAAGAG | | CCGAAAAGA | |
| | | | | GGUCAA | | GGGTCAA | |
| PTPN11 | EXON | − | chr12: 112472942-112472967 | UUUGCACUCC | 2140 | TTTGCACTCC | 2892 |
| | | | | UGUUGUUGU | | TGTTGTTGTA | |
| | | | | AGUGUC | | GTGTC | |
| PTPN11 | EXON | − | chr12: 112472981-112473006 | GUUUUCUUG | 2141 | GTTTTCTTGC | 2893 |
| | | | | CCUUUGACCC | | CTTTGACCCT | |
| | | | | UCUUUU | | CTTTT | |
| PTPN11 | EXON | − | chr12: 112473035-112473060 | AGCGGAAUA | 2142 | AGCGGAATA | 2894 |
| | | | | UUGAUACUU | | TTGATACTT | |
| | | | | ACAGGGC | | ACAGGGC | |
| PTPN11 | EXON | + | chr12: 112477636-112477661 | UCUUUUUCU | 2143 | TCTTTTTCTT | 2895 |
| | | | | UCUAGUUGA | | CTAGTTGAT | |
| | | | | UCAUACC | | CATACC | |
| PTPN11 | EXON | + | chr12: 112477637-112477662 | CUUUUUCUU | 2144 | CTTTTTCTTC | 2896 |
| | | | | CUAGUUGAU | | TAGTTGATC | |
| | | | | CAUACCA | | ATACCA | |
| PTPN11 | EXON | + | chr12: 112477653-112477678 | AUCAUACCA | 2145 | ATCATACCA | 2897 |
| | | | | GGGUUGUCC | | GGGTTGTCC | |
| | | | | UACACGA | | TACACGA | |
| PTPN11 | EXON | + | chr12: 112477703-112477728 | GAUUACAUC | 2146 | GATTACATC | 2898 |
| | | | | AAUGCAAAU | | AATGCAAAT | |
| | | | | AUCAUCA | | ATCATCA | |
| PTPN11 | EXON | − | chr12: 112477662-112477687 | GGAUCACCA | 2147 | GGATCACCA | 2899 |
| | | | | UCGUGUAGG | | TCGTGTAGG | |
| | | | | ACAACCC | | ACAACCC | |
| PTPN11 | EXON | − | chr12: 112477672-112477697 | AGGCUCAUU | 2148 | AGGCTCATT | 2900 |
| | | | | GGGAUCACC | | GGGATCACC | |
| | | | | AUCGUGU | | ATCGTGT | |
| PTPN11 | EXON | − | chr12: 112477688-112477713 | UGAUGUAAU | 2149 | TGATGTAAT | 2901 |
| | | | | CUGAAACAG | | CTGAAACAG | |
| | | | | GCUCAUU | | GCTCATT | |
| PTPN11 | EXON | − | chr12: 112477689-112477714 | UUGAUGUAA | 2150 | TTGATGTAA | 2902 |
| | | | | UCUGAAACA | | TCTGAAACA | |
| | | | | GGCUCAU | | GGCTCAT | |
| PTPN11 | EXON | − | chr12: 112477697-112477722 | UAUUUGCAU | 2151 | TATTTGCATT | 2903 |
| | | | | UGAUGUAAU | | GATGTAATC | |
| | | | | CUGAAAC | | TGAAAC | |
| PTPN11 | EXON | + | chr12: 112477890-112477915 | CCAAAAAGA | 2152 | CCAAAAAGA | 2904 |
| | | | | GUUACAUUG | | GTTACATTG | |
| | | | | CCACACA | | CCACACA | |
| PTPN11 | EXON | + | chr12: 112477907-112477932 | GCCACACAAG | 2153 | GCCACACAA | 2905 |
| | | | | GCUGCCUGCA | | GGCTGCCTG | |
| | | | | AAACA | | CAAAACA | |
| PTPN11 | EXON | + | chr12: 112477921-112477946 | CCUGCAAAAC | 2154 | CCTGCAAAA | 2906 |
| | | | | ACGGUGAAU | | CACGGTGAA | |
| | | | | GACUUU | | TGACTTT | |
| PTPN11 | EXON | + | chr12: 112477924-112477949 | GCAAAACAC | 2155 | GCAAAACAC | 2907 |
| | | | | GGUGAAUGA | | GGTGAATGA | |
| | | | | CUUUUGG | | CTTTTGG | |
| PTPN11 | EXON | + | chr12: 112477928-112477953 | AACACGGUG | 2156 | AACACGGTG | 2908 |
| | | | | AAUGACUUU | | AATGACTTT | |
| | | | | UGGCGGA | | TGGCGGA | |
| PTPN11 | EXON | + | chr12: 112477976-112478001 | GUGAUUGUC | 2157 | GTGATTGTC | 2909 |
| | | | | AUGACAACG | | ATGACAACG | |
| | | | | AAAGAAG | | AAAGAAG | |
| PTPN11 | EXON | + | chr12: 112477983-112478008 | UCAUGACAA | 2158 | TCATGACAA | 2910 |
| | | | | CGAAAGAAG | | CGAAAGAAG | |
| | | | | UGGAGAG | | TGGAGAG | |
| PTPN11 | EXON | + | chr12: 112477988-112478013 | ACAACGAAA | 2159 | ACAACGAAA | 2911 |
| | | | | GAAGUGGAG | | GAAGTGGAG | |
| | | | | AGAGGAA | | AGAGGAA | |
| PTPN11 | EXON | − | chr12: 112477846-112477871 | GGUUUCAAA | 2160 | GGTTTCAAA | 2912 |
| | | | | UUCAGGCUA | | TTCAGGCTA | |
| | | | | GAAAUUU | | GAAATTT | |
| PTPN11 | EXON | − | chr12: 112477859-112477884 | AAUUGUUGC | 2161 | AATTGTTGC | 2913 |
| | | | | ACUUGGUUU | | ACTTGGTTTC | |
| | | | | CAAAUUC | | AAATTC | |
| PTPN11 | EXON | − | chr12: 112477872-112477897 | TTTTTGGGCT | 2162 | UUUUUGGGC | 2914 |
| | | | | UUUGAAUUG | | TTGAATTGTT | |
| | | | | UUGCACU | | GCACT | |
| PTPN11 | EXON | − | chr12: 112477892-112477917 | CUUGUGUGG | 2163 | CTTGTGTGG | 2915 |
| | | | | CAAUGUAAC | | CAATGTAAC | |
| | | | | UCUUUUU | | TCTTTTT | |
| PTPN11 | EXON | − | chr12: 112477893-112477918 | CCUUGUGUG | 2164 | CCTTGTGTG | 2916 |
| | | | | GCAAUGUAA | | GCAATGTAA | |
| | | | | CUCUUUU | | CTCTTTT | |
| PTPN11 | EXON | − | chr12: 112477911-112477936 | ACCGUGUUU | 2165 | ACCGTGTTTT | 2917 |
| | | | | UGCAGGCAG | | GCAGGCAGC | |
| | | | | CCUUGUG | | CTTGTG | |
| PTPN11 | EXON | − | chr12: 112477924-112477949 | CCAAAAGUC | 2166 | CCAAAAGTC | 2918 |
| | | | | AUUCACCGU | | ATTCACCGT | |
| | | | | GUUUUGC | | GTTTTGC | |
| PTPN11 | EXON | − | chr12: 112477963-112477988 | CAUGACAAU | 2167 | CATGACAAT | 2919 |
| | | | | CACUCGGGA | | CACTCGGGA | |
| | | | | GUUUUCU | | GTTTTCT | |
| PTPN11 | EXON | − | chr12: 112477974-112477999 | UCUUUCGUU | 2168 | TCTTTCGTTG | 2920 |
| | | | | GUCAUGACA | | TCATGACAA | |
| | | | | AUCACUC | | TCACTC | |
| PTPN11 | EXON | − | chr12: 112477975-112478000 | UUCUUUCGU | 2169 | TTCTTTCGTT | 2921 |
| | | | | UGUCAUGAC | | GTCATGACA | |
| | | | | AAUCACU | | ATCACT | |
| PTPN11 | EXON | + | chr12: 112482066-112482091 | CUUCCAGAG | 2170 | CTTCCAGAG | 2922 |
| | | | | UAAAUGUGU | | TAAATGTGT | |
| | | | | CAAAUAC | | CAAATAC | |
| PTPN11 | EXON | + | chr12: 112482095-112482120 | CUGAUGAGU | 2171 | CTGATGAGT | 2923 |
| | | | | AUGCUCUAA | | ATGCTCTAA | |
| | | | | AAGAAUA | | AAGAATA | |
| PTPN11 | EXON | + | chr12: 112482111-112482136 | AAAAGAAUA | 2172 | AAAAGAATA | 2924 |
| | | | | UGGCGUCAU | | TGGCGTCAT | |
| | | | | GCGUGUU | | GCGTGTT | |
| PTPN11 | EXON | + | chr12: 112482169-112482194 | ACGCUAAGA | 2173 | ACGCTAAGA | 2925 |
| | | | | GAACUUAAA | | GAACTTAAA | |
| | | | | CUUUCAA | | CTTTCAA | |
| PTPN11 | EXON | + | chr12: 112482173-112482198 | UAAGAGAAC | 2174 | TAAGAGAAC | 2926 |
| | | | | UUAAACUUU | | TTAAACTTTC | |
| | | | | CAAAGGU | | AAAGGT | |
| PTPN11 | EXON | − | chr12: 112482072-112482097 | AGGCCAGUA | 2175 | AGGCCAGTA | 2927 |
| | | | | UUUGACACA | | TTTGACACA | |
| | | | | UUUACUC | | TTTACTC | |
| PTPN11 | EXON | − | chr12: 112482097-112482122 | CAUAUUCUU | 2176 | CATATTCTTT | 2928 |
| | | | | UUAGAGCAU | | TAGAGCATA | |
| | | | | ACUCAUC | | CTCATC | |
| PTPN11 | EXON | − | chr12: 112482158-112482183 | AGUUCUCUU | 2177 | AGTTCTCTTA | 2929 |
| | | | | AGCGUAUAG | | GCGTATAGT | |
| | | | | UCAUGAG | | CATGAG | |
| PTPN11 | EXON | + | chr12: 112486456-112486481 | UUCUUGGCU | 2178 | TTCTTGGCTC | 2930 |
| | | | | CUACUCCAGG | | TACTCCAGG | |
| | | | | GGAAUA | | GGAATA | |
| PTPN11 | EXON | + | chr12: 112486465-112486490 | CUACUCCAGG | 2179 | CTACTCCAG | 2931 |
| | | | | GGAAUACGG | | GGGAATACG | |
| | | | | AGAGAA | | GAGAGAA | |
| PTPN11 | EXON | + | chr12: 112486470-112486495 | CCAGGGGAA | 2180 | CCAGGGGAA | 2932 |
| | | | | UACGGAGAG | | TACGGAGAG | |
| | | | | AACGGUC | | AACGGTC | |
| PTPN11 | EXON | + | chr12: 112486485-112486510 | GAGAACGGU | 2181 | GAGAACGGT | 2933 |
| | | | | CUGGCAAUA | | CTGGCAATA | |
| | | | | CCACUUU | | CCACTTT | |
| PTPN11 | EXON | + | chr12: 112486491-112486516 | GGUCUGGCA | 2182 | GGTCTGGCA | 2934 |
| | | | | AUACCACUU | | ATACCACTT | |
| | | | | UCGGACC | | TCGGACC | |
| PTPN11 | EXON | + | chr12: 112486495-112486520 | UGGCAAUAC | 2183 | TGGCAATAC | 2935 |
| | | | | CACUUUCGG | | CACTTTCGG | |
| | | | | ACCUGGC | | ACCTGGC | |
| PTPN11 | EXON | + | chr12: 112486502-112486527 | ACCACUUUCG | 2184 | ACCACTTTC | 2936 |
| | | | | GACCUGGCCG | | GGACCTGGC | |
| | | | | GACCA | | CGGACCA | |
| PTPN11 | EXON | + | chr12: 112486520-112486545 | CGGACCACGG | 2185 | CGGACCACG | 2937 |
| | | | | CGUGCCCAGC | | GCGTGCCCA | |
| | | | | GACCC | | GCGACCC | |
| PTPN11 | EXON | + | chr12: 112486521-112486546 | GGACCACGGC | 2186 | GGACCACGG | 2938 |
| | | | | GUGCCCAGCG | | CGTGCCCAG | |
| | | | | ACCCU | | CGACCCT | |
| PTPN11 | EXON | + | chr12: 112486522-112486547 | GACCACGGCG | 2187 | GACCACGGC | 2939 |
| | | | | UGCCCAGCGA | | GTGCCCAGC | |
| | | | | CCCUG | | GACCCTG | |
| PTPN11 | EXON | + | chr12: 112486523-112486548 | ACCACGGCGU | 2188 | ACCACGGCG | 2940 |
| | | | | GCCCAGCGAC | | TGCCCAGCG | |
| | | | | CCUGG | | ACCCTGG | |
| PTPN11 | EXON | + | chr12: 112486531-112486556 | GUGCCCAGCG | 2189 | GTGCCCAGC | 2941 |
| | | | | ACCCUGGGG | | GACCCTGGG | |
| | | | | GCGUGC | | GGCGTGC | |
| PTPN11 | EXON | + | chr12: 112486540-112486565 | GACCCUGGG | 2190 | GACCCTGGG | 2942 |
| | | | | GGCGUGCUG | | GGCGTGCTG | |
| | | | | GACUUCC | | GACTTCC | |
| PTPN11 | EXON | + | chr12: 112486543-112486568 | CCUGGGGGC | 2191 | CCTGGGGGC | 2943 |
| | | | | GUGCUGGAC | | GTGCTGGAC | |
| | | | | UUCCUGG | | TTCCTGG | |
| PTPN11 | EXON | + | chr12: 112486546-112486571 | GGGGGCGUG | 2192 | GGGGGCGTG | 2944 |
| | | | | CUGGACUUCC | | CTGGACTTC | |
| | | | | UGGAGG | | CTGGAGG | |
| PTPN11 | EXON | + | chr12: 112486561-112486586 | UUCCUGGAG | 2193 | TTCCTGGAG | 2945 |
| | | | | GAGGUGCAC | | GAGGTGCAC | |
| | | | | CAUAAGC | | CATAAGC | |
| PTPN11 | EXON | + | chr12: 112486573-112486598 | GUGCACCAU | 2194 | GTGCACCAT | 2946 |
| | | | | AAGCAGGAG | | AAGCAGGAG | |
| | | | | AGCAUCA | | AGCATCA | |
| PTPN11 | EXON | + | chr12: 112486580-112486605 | AUAAGCAGG | 2195 | ATAAGCAGG | 2947 |
| | | | | AGAGCAUCA | | AGAGCATCA | |
| | | | | UGGAUGC | | TGGATGC | |
| PTPN11 | EXON | + | chr12: 112486581-112486606 | UAAGCAGGA | 2196 | TAAGCAGGA | 2948 |
| | | | | GAGCAUCAU | | GAGCATCAT | |
| | | | | GGAUGCA | | GGATGCA | |
| PTPN11 | EXON | + | chr12: 112486585-112486610 | CAGGAGAGC | 2197 | CAGGAGAGC | 2949 |
| | | | | AUCAUGGAU | | ATCATGGAT | |
| | | | | GCAGGGC | | GCAGGGC | |
| PTPN11 | EXON | + | chr12: 112486591-112486616 | AGCAUCAUG | 2198 | AGCATCATG | 2950 |
| | | | | GAUGCAGGG | | GATGCAGGG | |
| | | | | CCGGUCG | | CCGGTCG | |
| PTPN11 | EXON | + | chr12: 112486602-112486627 | UGCAGGGCC | 2199 | TGCAGGGCC | 2951 |
| | | | | GGUCGUGGU | | GGTCGTGGT | |
| | | | | GCACUGC | | GCACTGC | |
| PTPN11 | EXON | + | chr12: 112486627-112486652 | AGGUGACAG | 2200 | AGGTGACAG | 2952 |
| | | | | CUCCUGCUGC | | CTCCTGCTG | |
| | | | | CCCUCU | | CCCCTCT | |
| PTPN11 | EXON | + | chr12: 112486659-112486684 | AGCCUGUCCC | 2201 | AGCCTGTCC | 2953 |
| | | | | UGUCUCCUA | | CTGTCTCCTA | |
| | | | | GCGCCC | | GCGCCC | |
| PTPN11 | EXON | + | chr12: 112486660-112486685 | GCCUGUCCCU | 2202 | GCCTGTCCC | 2954 |
| | | | | GUCUCCUAGC | | TGTCTCCTA | |
| | | | | GCCCA | | GCGCCCA | |
| PTPN11 | EXON | + | chr12: 112486700-112486725 | UACCCACUCC | 2203 | TACCCACTC | 2955 |
| | | | | UAGCUCUUU | | CTAGCTCTTT | |
| | | | | AACUGU | | AACTGT | |
| PTPN11 | EXON | + | chr12: 112486723-112486748 | GUAGGAAGA | 2204 | GTAGGAAGA | 2956 |
| | | | | AUUUAAUAU | | ATTTAATAT | |
| | | | | CUGUUUG | | CTGTTTG | |
| PTPN11 | EXON | + | chr12: 112486744-112486769 | UUUGAGGCA | 2205 | TTTGAGGCA | 2957 |
| | | | | UAGAGCAAC | | TAGAGCAAC | |
| | | | | UGCAUUG | | TGCATTG | |
| PTPN11 | EXON | + | chr12: 112486745-112486770 | UUGAGGCAU | 2206 | TTGAGGCAT | 2958 |
| | | | | AGAGCAACU | | AGAGCAACT | |
| | | | | GCAUUGA | | GCATTGA | |
| PTPN11 | EXON | + | chr12: 112486762-112486787 | UGCAUUGAG | 2207 | TGCATTGAG | 2959 |
| | | | | GGACAUUUU | | GGACATTTT | |
| | | | | GAUCCCA | | GATCCCA | |
| PTPN11 | EXON | + | chr12: 112486797-112486822 | CUCCUAGACC | 2208 | CTCCTAGAC | 2960 |
| | | | | CUACAGCACU | | CCTACAGCA | |
| | | | | GCCAU | | CTGCCAT | |
| PTPN11 | EXON | + | chr12: 112486803-112486828 | GACCCUACAG | 2209 | GACCCTACA | 2961 |
| | | | | CACUGCCAUU | | GCACTGCCA | |
| | | | | GGCCA | | TTGGCCA | |
| PTPN11 | EXON | + | chr12: 112486809-112486834 | ACAGCACUGC | 2210 | ACAGCACTG | 2962 |
| | | | | CAUUGGCCA | | CCATTGGCC | |
| | | | | UGGCCA | | ATGGCCA | |
| PTPN11 | EXON | + | chr12: 112486895-112486920 | AGUUGUGCA | 2211 | AGTTGTGCA | 2963 |
| | | | | UUAAACAAC | | TTAAACAAC | |
| | | | | UUCAUCC | | TTCATCC | |
| PTPN11 | EXON | − | chr12: 112486473-112486498 | CCAGACCGUU | 2212 | CCAGACCGT | 2964 |
| | | | | CUCUCCGUAU | | TCTCTCCGTA | |
| | | | | UCCCC | | TTCCCC | |
| PTPN11 | EXON | − | chr12: 112486506-112486531 | GCCGUGGUCC | 2213 | GCCGTGGTC | 2965 |
| | | | | GGCCAGGUCC | | CGGCCAGGT | |
| | | | | GAAAG | | CCGAAAG | |
| PTPN11 | EXON | − | chr12: 112486517-112486542 | UCGCUGGGC | 2214 | TCGCTGGGC | 2966 |
| | | | | ACGCCGUGG | | ACGCCGTGG | |
| | | | | UCCGGCC | | TCCGGCC | |
| PTPN11 | EXON | − | chr12: 112486522-112486547 | CAGGGUCGC | 2215 | CAGGGTCGC | 2967 |
| | | | | UGGGCACGCC | | TGGGCACGC | |
| | | | | GUGGUC | | CGTGGTC | |
| PTPN11 | EXON | − | chr12: 112486527-112486552 | GCCCCCAGGG | 2216 | GCCCCCAGG | 2968 |
| | | | | UCGCUGGGC | | GTCGCTGGG | |
| | | | | ACGCCG | | CACGCCG | |
| PTPN11 | EXON | − | chr12: 112486537-112486562 | AGUCCAGCAC | 2217 | AGTCCAGCA | 2969 |
| | | | | GCCCCCAGGG | | CGCCCCCAG | |
| | | | | UCGCU | | GGTCGCT | |
| PTPN11 | EXON | − | chr12: 112486538-112486563 | AAGUCCAGC | 2218 | AAGTCCAGC | 2970 |
| | | | | ACGCCCCCAG | | ACGCCCCCA | |
| | | | | GGUCGC | | GGGTCGC | |
| PTPN11 | EXON | − | chr12: 112486545-112486570 | CUCCAGGAA | 2219 | CTCCAGGAA | 2971 |
| | | | | GUCCAGCACG | | GTCCAGCAC | |
| | | | | CCCCCA | | GCCCCCA | |
| PTPN11 | EXON | − | chr12: 112486546-112486571 | CCUCCAGGAA | 2220 | CCTCCAGGA | 2972 |
| | | | | GUCCAGCACG | | AGTCCAGCA | |
| | | | | CCCCC | | CGCCCCC | |
| PTPN11 | EXON | − | chr12: 112486566-112486591 | CUCCUGCUUA | 2221 | CTCCTGCTTA | 2973 |
| | | | | UGGUGCACC | | TGGTGCACC | |
| | | | | UCCUCC | | TCCTCC | |
| PTPN11 | EXON | − | chr12: 112486581-112486606 | UGCAUCCAU | 2222 | TGCATCCAT | 2974 |
| | | | | GAUGCUCUCC | | GATGCTCTC | |
| | | | | UGCUUA | | CTGCTTA | |
| PTPN11 | EXON | − | chr12: 112486612-112486637 | GCUGUCACCU | 2223 | GCTGTCACC | 2975 |
| | | | | GCAGUGCACC | | TGCAGTGCA | |
| | | | | ACGAC | | CCACGAC | |
| PTPN11 | EXON | − | chr12: 112486641-112486666 | ACAGGCUGU | 2224 | ACAGGCTGT | 2976 |
| | | | | GGCCUAGAG | | GGCCTAGAG | |
| | | | | GGGCAGC | | GGGCAGC | |
| PTPN11 | EXON | − | chr12: 112486648-112486673 | GACAGGGAC | 2225 | GACAGGGAC | 2977 |
| | | | | AGGCUGUGG | | AGGCTGTGG | |
| | | | | CCUAGAG | | CCTAGAG | |
| PTPN11 | EXON | − | chr12: 112486649-112486674 | AGACAGGGA | 2226 | AGACAGGGA | 2978 |
| | | | | CAGGCUGUG | | CAGGCTGTG | |
| | | | | GCCUAGA | | GCCTAGA | |
| PTPN11 | EXON | − | chr12: 112486650-112486675 | GAGACAGGG | 2227 | GAGACAGGG | 2979 |
| | | | | ACAGGCUGU | | ACAGGCTGT | |
| | | | | GGCCUAG | | GGCCTAG | |
| PTPN11 | EXON | − | chr12: 112486658-112486683 | GGCGCUAGG | 2228 | GGCGCTAGG | 2980 |
| | | | | AGACAGGGA | | AGACAGGGA | |
| | | | | CAGGCUG | | CAGGCTG | |
| PTPN11 | EXON | − | chr12: 112486664-112486689 | GCCCUGGGCG | 2229 | GCCCTGGGC | 2981 |
| | | | | CUAGGAGAC | | GCTAGGAGA | |
| | | | | AGGGAC | | CAGGGAC | |
| PTPN11 | EXON | − | chr12: 112486669-112486694 | AGCAAGCCCU | 2230 | AGCAAGCCC | 2982 |
| | | | | GGGCGCUAG | | TGGGCGCTA | |
| | | | | GAGACA | | GGAGACA | |
| PTPN11 | EXON | − | chr12: 112486670-112486695 | AAGCAAGCCC | 2231 | AAGCAAGCC | 2983 |
| | | | | UGGGCGCUA | | CTGGGCGCT | |
| | | | | GGAGAC | | AGGAGAC | |
| PTPN11 | EXON | − | chr12: 112486677-112486702 | UAGGUAAAA | 2232 | TAGGTAAAA | 2984 |
| | | | | GCAAGCCCUG | | GCAAGCCCT | |
| | | | | GGCGCU | | GGGCGCT | |
| PTPN11 | EXON | − | chr12: 112486684-112486709 | GAGUGGGUA | 2233 | GAGTGGGTA | 2985 |
| | | | | GGUAAAAGC | | GGTAAAAGC | |
| | | | | AAGCCCU | | AAGCCCT | |
| PTPN11 | EXON | − | chr12: 112486685-112486710 | GGAGUGGGU | 2234 | GGAGTGGGT | 2986 |
| | | | | AGGUAAAAG | | AGGTAAAAG | |
| | | | | CAAGCCC | | CAAGCCC | |
| PTPN11 | EXON | − | chr12: 112486701-112486726 | UACAGUUAA | 2235 | TACAGTTAA | 2987 |
| | | | | AGAGCUAGG | | AGAGCTAGG | |
| | | | | AGUGGGU | | AGTGGGT | |
| PTPN11 | EXON | − | chr12: 112486705-112486730 | UUCCUACAG | 2236 | TTCCTACAG | 2988 |
| | | | | UUAAAGAGC | | TTAAAGAGC | |
| | | | | UAGGAGU | | TAGGAGT | |
| PTPN11 | EXON | − | chr12: 112486706-112486731 | CUUCCUACAG | 2237 | CTTCCTACA | 2989 |
| | | | | UUAAAGAGC | | GTTAAAGAG | |
| | | | | UAGGAG | | CTAGGAG | |
| PTPN11 | EXON | − | chr12: 112486711-112486736 | AAAUUCUUC | 2238 | AAATTCTTC | 2990 |
| | | | | CUACAGUUA | | CTACAGTTA | |
| | | | | AAGAGCU | | AAGAGCT | |
| PTPN11 | EXON | − | chr12: 112486786-112486811 | GUAGGGUCU | 2239 | GTAGGGTCT | 2991 |
| | | | | AGGAGAAAU | | AGGAGAAAT | |
| | | | | AUGCCUU | | ATGCCTT | |
| PTPN11 | EXON | − | chr12: 112486787-112486812 | UGUAGGGUC | 2240 | TGTAGGGTC | 2992 |
| | | | | UAGGAGAAA | | TAGGAGAAA | |
| | | | | UAUGCCU | | TATGCCT | |
| PTPN11 | EXON | − | chr12: 112486802-112486827 | GGCCAAUGG | 2241 | GGCCAATGG | 2993 |
| | | | | CAGUGCUGU | | CAGTGCTGT | |
| | | | | AGGGUCU | | AGGGTCT | |
| PTPN11 | EXON | − | chr12: 112486808-112486833 | GGCCAUGGCC | 2242 | GGCCATGGC | 2994 |
| | | | | AAUGGCAGU | | CAATGGCAG | |
| | | | | GCUGUA | | TGCTGTA | |
| PTPN11 | EXON | − | chr12: 112486809-112486834 | UGGCCAUGG | 2243 | TGGCCATGG | 2995 |
| | | | | CCAAUGGCA | | CCAATGGCA | |
| | | | | GUGCUGU | | GTGCTGT | |
| PTPN11 | EXON | − | chr12: 112486821-112486846 | AGCAUGUUG | 2244 | AGCATGTTG | 2996 |
| | | | | CCAUGGCCAU | | CCATGGCCA | |
| | | | | GGCCAA | | TGGCCAA | |
| PTPN11 | EXON | − | chr12: 112486828-112486853 | UUAACUGAG | 2245 | TTAACTGAG | 2997 |
| | | | | CAUGUUGCC | | CATGTTGCC | |
| | | | | AUGGCCA | | ATGGCCA | |
| PTPN11 | EXON | − | chr12: 112486834-112486859 | GCUGUUUUA | 2246 | GCTGTTTTA | 2998 |
| | | | | ACUGAGCAU | | ACTGAGCAT | |
| | | | | GUUGCCA | | GTTGCCA | |
| PTPN11 | EXON | − | chr12: 112486890-112486915 | AAGUUGUUU | 2247 | AAGTTGTTT | 2999 |
| | | | | AAUGCACAA | | AATGCACAA | |
| | | | | CUUCUGG | | CTTCTGG | |
| PTPN11 | EXON | − | chr12: 112486893-112486918 | AUGAAGUUG | 2248 | ATGAAGTTG | 3000 |
| | | | | UUUAAUGCA | | TTTAATGCA | |
| | | | | CAACUUC | | CAACTTC | |
| PTPN11 | EXON | + | chr12: 112488426-112488451 | GUCCUUCUGC | 2249 | GTCCTTCTGC | 3001 |
| | | | | CCGCAGUGCU | | CCGCAGTGC | |
| | | | | GGAAU | | TGGAAT | |
| PTPN11 | EXON | + | chr12: 112488430-112488455 | UUCUGCCCGC | 2250 | TTCTGCCCG | 3002 |
| | | | | AGUGCUGGA | | CAGTGCTGG | |
| | | | | AUUGGC | | AATTGGC | |
| PTPN11 | EXON | + | chr12: 112488435-112488460 | CCCGCAGUGC | 2251 | CCCGCAGTG | 3003 |
| | | | | UGGAAUUGG | | CTGGAATTG | |
| | | | | CCGGAC | | GCCGGAC | |
| PTPN11 | EXON | + | chr12: 112488436-112488461 | CCGCAGUGCU | 2252 | CCGCAGTGC | 3004 |
| | | | | GGAAUUGGC | | TGGAATTGG | |
| | | | | CGGACA | | CCGGACA | |
| PTPN11 | EXON | + | chr12: 112488483-112488508 | UUCUUAUUG | 2253 | TTCTTATTGA | 3005 |
| | | | | ACAUCAUCA | | CATCATCAG | |
| | | | | GAGAGAA | | AGAGAA | |
| PTPN11 | EXON | + | chr12: 112488486-112488511 | UUAUUGACA | 2254 | TTATTGACA | 3006 |
| | | | | UCAUCAGAG | | TCATCAGAG | |
| | | | | AGAAAGG | | AGAAAGG | |
| PTPN11 | EXON | + | chr12: 112488487-112488512 | UAUUGACAU | 2255 | TATTGACAT | 3007 |
| | | | | CAUCAGAGA | | CATCAGAGA | |
| | | | | GAAAGGU | | GAAAGGT | |
| PTPN11 | EXON | + | chr12: 112488495-112488520 | UCAUCAGAG | 2256 | TCATCAGAG | 3008 |
| | | | | AGAAAGGUG | | AGAAAGGTG | |
| | | | | GGUCAUC | | GGTCATC | |
| PTPN11 | EXON | + | chr12: 112488498-112488523 | UCAGAGAGA | 2257 | TCAGAGAGA | 3009 |
| | | | | AAGGUGGGU | | AAGGTGGGT | |
| | | | | CAUCUGG | | CATCTGG | |
| PTPN11 | EXON | + | chr12: 112488499-112488524 | CAGAGAGAA | 2258 | CAGAGAGAA | 3010 |
| | | | | AGGUGGGUC | | AGGTGGGTC | |
| | | | | AUCUGGU | | ATCTGGT | |
| PTPN11 | EXON | − | chr12: 112488431-112488456 | GGCCAAUUCC | 2259 | GGCCAATTC | 3011 |
| | | | | AGCACUGCG | | CAGCACTGC | |
| | | | | GGCAGA | | GGGCAGA | |
| PTPN11 | EXON | − | chr12: 112488438-112488463 | CCUGUCCGGC | 2260 | CCTGTCCGG | 3012 |
| | | | | CAAUUCCAGC | | CCAATTCCA | |
| | | | | ACUGC | | GCACTGC | |
| PTPN11 | EXON | − | chr12: 112488439-112488464 | CCCUGUCCGG | 2261 | CCCTGTCCG | 3013 |
| | | | | CCAAUUCCAG | | GCCAATTCC | |
| | | | | CACUG | | AGCACTG | |
| PTPN11 | EXON | − | chr12: 112488457-112488482 | AUCAAUCAC | 2262 | ATCAATCAC | 3014 |
| | | | | AAUGAACGU | | AATGAACGT | |
| | | | | CCCUGUC | | CCCTGTC | |
| PTPN11 | EXON | + | chr12: 112489037-112489062 | AUUGACGUU | 2263 | ATTGACGTT | 3015 |
| | | | | CCCAAAACCA | | CCCAAAACC | |
| | | | | UCCAGA | | ATCCAGA | |
| PTPN11 | EXON | + | chr12: 112489042-112489067 | CGUUCCCAAA | 2264 | CGTTCCCAA | 3016 |
| | | | | ACCAUCCAGA | | AACCATCCA | |
| | | | | UGGUG | | GATGGTG | |
| PTPN11 | EXON | + | chr12: 112489051-112489076 | AACCAUCCAG | 2265 | AACCATCCA | 3017 |
| | | | | AUGGUGCGG | | GATGGTGCG | |
| | | | | UCUCAG | | GTCTCAG | |
| PTPN11 | EXON | + | chr12: 112489056-112489081 | UCCAGAUGG | 2266 | TCCAGATGG | 3018 |
| | | | | UGCGGUCUC | | TGCGGTCTC | |
| | | | | AGAGGUC | | AGAGGTC | |
| PTPN11 | EXON | + | chr12: 112489057-112489082 | CCAGAUGGU | 2267 | CCAGATGGT | 3019 |
| | | | | GCGGUCUCA | | GCGGTCTCA | |
| | | | | GAGGUCA | | GAGGTCA | |
| PTPN11 | EXON | + | chr12: 112489061-112489086 | AUGGUGCGG | 2268 | ATGGTGCGG | 3020 |
| | | | | UCUCAGAGG | | TCTCAGAGG | |
| | | | | UCAGGGA | | TCAGGGA | |
| PTPN11 | EXON | + | chr12: 112489097-112489122 | GAAGCACAG | 2269 | GAAGCACAG | 3021 |
| | | | | UACCGAUUU | | TACCGATTT | |
| | | | | AUCUAUA | | ATCTATA | |
| PTPN11 | EXON | + | chr12: 112489100-112489125 | GCACAGUACC | 2270 | GCACAGTAC | 3022 |
| | | | | GAUUUAUCU | | CGATTTATCT | |
| | | | | AUAUGG | | ATATGG | |
| PTPN11 | EXON | + | chr12: 112489132-112489157 | GCAUUAUAU | 2271 | GCATTATAT | 3023 |
| | | | | UGAAACACU | | TGAAACACT | |
| | | | | ACAGCGC | | ACAGCGC | |
| PTPN11 | EXON | + | chr12: 112489148-112489173 | CUACAGCGCA | 2272 | CTACAGCGC | 3024 |
| | | | | GGAUUGAAG | | AGGATTGAA | |
| | | | | AAGAGC | | GAAGAGC | |
| PTPN11 | EXON | + | chr12: 112489161-112489186 | UUGAAGAAG | 2273 | TTGAAGAAG | 3025 |
| | | | | AGCAGGUAC | | AGCAGGTAC | |
| | | | | CAGCCUG | | CAGCCTG | |
| PTPN11 | EXON | + | chr12: 112489162-112489187 | UGAAGAAGA | 2274 | TGAAGAAGA | 3026 |
| | | | | GCAGGUACC | | GCAGGTACC | |
| | | | | AGCCUGA | | AGCCTGA | |
| PTPN11 | EXON | + | chr12: 112489166-112489191 | GAAGAGCAG | 2275 | GAAGAGCAG | 3027 |
| | | | | GUACCAGCCU | | GTACCAGCC | |
| | | | | GAGGGC | | TGAGGGC | |
| PTPN11 | EXON | − | chr12: 112489017-112489042 | UCAAUAUCG | 2276 | TCAATATCG | 3028 |
| | | | | CAGUCAACAC | | CAGTCAACA | |
| | | | | CUACGA | | CCTACGA | |
| PTPN11 | EXON | − | chr12: 112489049-112489074 | GAGACCGCAC | 2277 | GAGACCGCA | 3029 |
| | | | | CAUCUGGAU | | CCATCTGGA | |
| | | | | GGUUUU | | TGGTTTT | |
| PTPN11 | EXON | − | chr12: 112489050-112489075 | UGAGACCGC | 2278 | TGAGACCGC | 3030 |
| | | | | ACCAUCUGG | | ACCATCTGG | |
| | | | | AUGGUUU | | ATGGTTT | |
| PTPN11 | EXON | − | chr12: 112489056-112489081 | GACCUCUGA | 2279 | GACCTCTGA | 3031 |
| | | | | GACCGCACCA | | GACCGCACC | |
| | | | | UCUGGA | | ATCTGGA | |
| PTPN11 | EXON | − | chr12: 112489060-112489085 | CCCUGACCUC | 2280 | CCCTGACCT | 3032 |
| | | | | UGAGACCGC | | CTGAGACCG | |
| | | | | ACCAUC | | CACCATC | |
| PTPN11 | EXON | − | chr12: 112489093-112489118 | GAUAAAUCG | 2281 | GATAAATCG | 3033 |
| | | | | GUACUGUGC | | GTACTGTGC | |
| | | | | UUCUGUC | | TTCTGTC | |
| PTPN11 | EXON | − | chr12: 112489111-112489136 | AUGCUGGAC | 2282 | ATGCTGGAC | 3034 |
| | | | | CGCCAUAUA | | CGCCATATA | |
| | | | | GAUAAAU | | GATAAAT | |
| PTPN11 | EXON | − | chr12: 112489132-112489157 | GCGCUGUAG | 2283 | GCGCTGTAG | 3035 |
| | | | | UGUUUCAAU | | TGTTTCAAT | |
| | | | | AUAAUGC | | ATAATGC | |
| PTPN11 | EXON | + | chr12: 112502127-112502152 | CUCUUCCAAA | 2284 | CTCTTCCAA | 3036 |
| | | | | UUUCAGAAA | | ATTTCAGAA | |
| | | | | AGCAAG | | AAGCAAG | |
| PTPN11 | EXON | + | chr12: 112502132-112502157 | CCAAAUUUC | 2285 | CCAAATTTC | 3037 |
| | | | | AGAAAAGCA | | AGAAAAGCA | |
| | | | | AGAGGAA | | AGAGGAA | |
| PTPN11 | EXON | + | chr12: 112502133-112502158 | CAAAUUUCA | 2286 | CAAATTTCA | 3038 |
| | | | | GAAAAGCAA | | GAAAAGCAA | |
| | | | | GAGGAAA | | GAGGAAA | |
| PTPN11 | EXON | + | chr12: 112502167-112502192 | UAUACAAAU | 2287 | TATACAAAT | 3039 |
| | | | | AUUAAGUAU | | ATTAAGTAT | |
| | | | | UCUCUAG | | TCTCTAG | |
| PTPN11 | EXON | + | chr12: 112502180-112502205 | AGUAUUCUC | 2288 | AGTATTCTCT | 3040 |
| | | | | UAGCGGACC | | AGCGGACCA | |
| | | | | AGACGAG | | GACGAG | |
| PTPN11 | EXON | + | chr12: 112502245-112502270 | CCCUGUGCAG | 2289 | CCCTGTGCA | 3041 |
| | | | | AGUAAGUAG | | GAGTAAGTA | |
| | | | | UGCUGA | | GTGCTGA | |
| PTPN11 | EXON | − | chr12: 112502135-112502160 | CCUUUCCUCU | 2290 | CCTTTCCTCT | 3042 |
| | | | | UGCUUUUCU | | TGCTTTTCTG | |
| | | | | GAAAUU | | AAATT | |
| PTPN11 | EXON | − | chr12: 112502199-112502224 | GAGAGGGCU | 2291 | GAGAGGGCT | 3043 |
| | | | | CUGAUCUCCA | | CTGATCTCC | |
| | | | | CUCGUC | | ACTCGTC | |
| PTPN11 | EXON | − | chr12: 112502220-112502245 | UGGCGUUGG | 2292 | TGGCGTTGG | 3044 |
| | | | | AGUACAAGG | | AGTACAAGG | |
| | | | | CGGGAGA | | CGGGAGA | |
| PTPN11 | EXON | − | chr12: 112502221-112502246 | GUGGCGUUG | 2293 | GTGGCGTTG | 3045 |
| | | | | GAGUACAAG | | GAGTACAAG | |
| | | | | GCGGGAG | | GCGGGAG | |
| PTPN11 | EXON | − | chr12: 112502226-112502251 | ACAGGGUGG | 2294 | ACAGGGTGG | 3046 |
| | | | | CGUUGGAGU | | CGTTGGAGT | |
| | | | | ACAAGGC | | ACAAGGC | |
| PTPN11 | EXON | − | chr12: 112502227-112502252 | CACAGGGUG | 2295 | CACAGGGTG | 3047 |
| | | | | GCGUUGGAG | | GCGTTGGAG | |
| | | | | UACAAGG | | TACAAGG | |
| PTPN11 | EXON | − | chr12: 112502230-112502255 | CUGCACAGG | 2296 | CTGCACAGG | 3048 |
| | | | | GUGGCGUUG | | GTGGCGTTG | |
| | | | | GAGUACA | | GAGTACA | |
| PTPN11 | EXON | − | chr12: 112502239-112502264 | CUACUUACUC | 2297 | CTACTTACTC | 3049 |
| | | | | UGCACAGGG | | TGCACAGGG | |
| | | | | UGGCGU | | TGGCGT | |
| PTPN11 | EXON | − | chr12: 112502245-112502270 | UCAGCACUAC | 2298 | TCAGCACTA | 3050 |
| | | | | UUACUCUGC | | CTTACTCTGC | |
| | | | | ACAGGG | | ACAGGG | |
| PTPN11 | EXON | − | chr12: 112502248-112502273 | CCUUCAGCAC | 2299 | CCTTCAGCA | 3051 |
| | | | | UACUUACUC | | CTACTTACTC | |
| | | | | UGCACA | | TGCACA | |
| PTPN11 | EXON | − | chr12: 112502249-112502274 | UCCUUCAGCA | 2300 | TCCTTCAGC | 3052 |
| | | | | CUACUUACUC | | ACTACTTAC | |
| | | | | UGCAC | | TCTGCAC | |
| PTPN11 | EXON | + | chr12: 112504704-112504729 | GACAGUGCU | 2301 | GACAGTGCT | 3053 |
| | | | | AGAGUCUAU | | AGAGTCTAT | |
| | | | | GAAAACG | | GAAAACG | |
| PTPN11 | EXON | + | chr12: 112504705-112504730 | ACAGUGCUA | 2302 | ACAGTGCTA | 3054 |
| | | | | GAGUCUAUG | | GAGTCTATG | |
| | | | | AAAACGU | | AAAACGT | |
| PTPN11 | EXON | + | chr12: 112504769-112504794 | CCUGCCAAAA | 2303 | CCTGCCAAA | 3055 |
| | | | | CUUCAGCACA | | ACTTCAGCA | |
| | | | | GAAAU | | CAGAAAT | |
| PTPN11 | EXON | − | chr12: 112504693-112504718 | ACUCUAGCAC | 2304 | ACTCTAGCA | 3056 |
| | | | | UGUCUUCUC | | CTGTCTTCTC | |
| | | | | UCAUUC | | TCATTC | |
| PTPN11 | EXON | − | chr12: 112504736-112504761 | UCUGAAACU | 2305 | TCTGAAACT | 3057 |
| | | | | UUUCUGCUG | | TTTCTGCTGT | |
| | | | | UUGCAUC | | TGCATC | |
| PTPN11 | EXON | − | chr12: 112504772-112504797 | CCUAUUUCU | 2306 | CCTATTTCTG | 3058 |
| | | | | GUGCUGAAG | | TGCTGAAGT | |
| | | | | UUUUGGC | | TTTGGC | |
| PTPN11 | EXON | − | chr12: 112504776-112504801 | AAUACCUAU | 2307 | AATACCTAT | 3059 |
| | | | | UUCUGUGCU | | TTCTGTGCTG | |
| | | | | GAAGUUU | | AAGTTT | |
| PTPN11 | EXON | + | chr12: 112505869-112505894 | AGAAAGUUU | 2308 | AGAAAGTTT | 3060 |
| | | | | AUGUGAAGA | | ATGTGAAGA | |
| | | | | CAGAAUU | | CAGAATT | |
| PTPN11 | EXON | + | chr12: 112505875-112505900 | UUUAUGUGA | 2309 | TTTATGTGA | 3061 |
| | | | | AGACAGAAU | | AGACAGAAT | |
| | | | | UUGGAUU | | TTGGATT | |
| PTPN11 | EXON | + | chr12: 112505879-112505904 | UGUGAAGAC | 2310 | TGTGAAGAC | 3062 |
| | | | | AGAAUUUGG | | AGAATTTGG | |
| | | | | AUUUGGA | | ATTTGGA | |
| PTPN11 | EXON | + | chr12: 112505891-112505916 | AUUUGGAUU | 2311 | ATTTGGATTT | 3063 |
| | | | | UGGAAGGCU | | GGAAGGCTT | |
| | | | | UGCAAUG | | GCAATG | |
| PTPN11 | EXON | + | chr12: 112506051-112506076 | AUUUUAUAG | 2312 | ATTTTATAG | 3064 |
| | | | | AAUUUGUUU | | AATTTGTTTG | |
| | | | | GAAAUUG | | AAATTG | |
| PTPN11 | EXON | + | chr12: 112506089-112506114 | AUUGUGCGC | 2313 | ATTGTGCGC | 3065 |
| | | | | UGUAUUUUG | | TGTATTTTGC | |
| | | | | CAGAUUA | | AGATTA | |
| PTPN11 | EXON | + | chr12: 112506090-112506115 | UUGUGCGCU | 2314 | TTGTGCGCT | 3066 |
| | | | | GUAUUUUGC | | GTATTTTGC | |
| | | | | AGAUUAU | | AGATTAT | |
| PTPN11 | EXON | + | chr12: 112506091-112506116 | UGUGCGCUG | 2315 | TGTGCGCTG | 3067 |
| | | | | UAUUUUGCA | | TATTTTGCA | |
| | | | | GAUUAUG | | GATTATG | |
| PTPN11 | EXON | + | chr12: 112506111-112506136 | UUAUGGGGA | 2316 | TTATGGGGA | 3068 |
| | | | | UUCAAAUUC | | TTCAAATTCT | |
| | | | | UAGUAAU | | AGTAAT | |
| PTPN11 | EXON | + | chr12: 112506171-112506196 | GUUUAAUUU | 2317 | GTTTAATTTT | 3069 |
| | | | | UUUUUUUCC | | TTTTTTCCTC | |
| | | | | UCAUUGU | | ATTGT | |
| PTPN11 | EXON | + | chr12: 112506172-112506197 | UUUAAUUUU | 2318 | TTTAATTTTT | 3070 |
| | | | | UUUUUUCCU | | TTTTTCCTCA | |
| | | | | CAUUGUU | | TTGTT | |
| PTPN11 | EXON | + | chr12: 112506173-112506198 | UUAAUUUUU | 2319 | TTAATTTTTT | 3071 |
| | | | | UUUUUCCUC | | TTTTCCTCAT | |
| | | | | AUUGUUG | | TGTTG | |
| PTPN11 | EXON | + | chr12: 112506195-112506220 | UUGGGGAUG | 2320 | TTGGGGATG | 3072 |
| | | | | AUGAGAAGA | | ATGAGAAGA | |
| | | | | AAUGAUU | | AATGATT | |
| PTPN11 | EXON | + | chr12: 112506196-112506221 | UGGGGAUGA | 2321 | TGGGGATGA | 3073 |
| | | | | UGAGAAGAA | | TGAGAAGAA | |
| | | | | AUGAUUU | | ATGATTT | |
| PTPN11 | EXON | + | chr12: 112506263-112506288 | UCAUUUACC | 2322 | TCATTTACC | 3074 |
| | | | | AUCAUGUAU | | ATCATGTAT | |
| | | | | CCAGUAG | | CCAGTAG | |
| PTPN11 | EXON | + | chr12: 112506280-112506305 | UCCAGUAGU | 2323 | TCCAGTAGT | 3075 |
| | | | | GGAUAAUUC | | GGATAATTC | |
| | | | | AUUUUGA | | ATTTTGA | |
| PTPN11 | EXON | + | chr12: 112506293-112506318 | AAUUCAUUU | 2324 | AATTCATTTT | 3076 |
| | | | | UGAUGGCUU | | GATGGCTTC | |
| | | | | CUAUUUU | | TATTTT | |
| PTPN11 | EXON | + | chr12: 112506348-112506373 | GACUGUCAG | 2325 | GACTGTCAG | 3077 |
| | | | | AAGUUGACC | | AAGTTGACC | |
| | | | | UUUGCAC | | TTTGCAC | |
| PTPN11 | EXON | + | chr12: 112506378-112506403 | UUAAAGAGU | 2326 | TTAAAGAGT | 3078 |
| | | | | CAUAGAAAA | | CATAGAAAA | |
| | | | | AGAAUCA | | AGAATCA | |
| PTPN11 | EXON | + | chr12: 112506395-112506420 | AAGAAUCAU | 2327 | AAGAATCAT | 3079 |
| | | | | GGAUAUUUA | | GGATATTTA | |
| | | | | UGAAUUA | | TGAATTA | |
| PTPN11 | EXON | + | chr12: 112506402-112506427 | AUGGAUAUU | 2328 | ATGGATATT | 3080 |
| | | | | UAUGAAUUA | | TATGAATTA | |
| | | | | AGGUAAG | | AGGTAAG | |
| PTPN11 | EXON | + | chr12: 112506407-112506432 | UAUUUAUGA | 2329 | TATTTATGA | 3081 |
| | | | | AUUAAGGUA | | ATTAAGGTA | |
| | | | | AGAGGUG | | AGAGGTG | |
| PTPN11 | EXON | + | chr12: 112506453-112506478 | UUCCAGCCGU | 2330 | TTCCAGCCG | 3082 |
| | | | | UGACCAAUU | | TTGACCAAT | |
| | | | | AUAGUU | | TATAGTT | |
| PTPN11 | EXON | + | chr12: 112506475-112506500 | GUUCGGCUG | 2331 | GTTCGGCTG | 3083 |
| | | | | UUGACUGAG | | TTGACTGAG | |
| | | | | AAGUUUG | | AAGTTTG | |
| PTPN11 | EXON | + | chr12: 112506478-112506503 | CGGCUGUUG | 2332 | CGGCTGTTG | 3084 |
| | | | | ACUGAGAAG | | ACTGAGAAG | |
| | | | | UUUGUGG | | TTTGTGG | |
| PTPN11 | EXON | + | chr12: 112506479-112506504 | GGCUGUUGA | 2333 | GGCTGTTGA | 3085 |
| | | | | CUGAGAAGU | | CTGAGAAGT | |
| | | | | UUGUGGU | | TTGTGGT | |
| PTPN11 | EXON | + | chr12: 112506537-112506562 | AAUAAUUGU | 2334 | AATAATTGT | 3086 |
| | | | | CUUGUACUU | | CTTGTACTTA | |
| | | | | AGAAAAA | | GAAAAA | |
| PTPN11 | EXON | + | chr12: 112506563-112506588 | GGCGUCUAU | 2335 | GGCGTCTAT | 3087 |
| | | | | GAAUGACCA | | GAATGACCA | |
| | | | | GUGUUUU | | GTGTTTT | |
| PTPN11 | EXON | + | chr12: 112506605-112506630 | UGACAAACU | 2336 | TGACAAACT | 3088 |
| | | | | UAUCCCAAA | | TATCCCAAA | |
| | | | | ACUUUAG | | ACTTTAG | |
| PTPN11 | EXON | + | chr12: 112506647-112506672 | CCCCCAACUG | 2337 | CCCCCAACT | 3089 |
| | | | | UUAGUCAAU | | GTTAGTCAA | |
| | | | | CUGAGC | | TCTGAGC | |
| PTPN11 | EXON | + | chr12: 112506648-112506673 | CCCCAACUGU | 2338 | CCCCAACTG | 3090 |
| | | | | UAGUCAAUC | | TTAGTCAAT | |
| | | | | UGAGCU | | CTGAGCT | |
| PTPN11 | EXON | + | chr12: 112506657-112506682 | UUAGUCAAU | 2339 | TTAGTCAAT | 3091 |
| | | | | CUGAGCUGG | | CTGAGCTGG | |
| | | | | GCUCAGC | | GCTCAGC | |
| PTPN11 | EXON | + | chr12: 112506658-112506683 | UAGUCAAUC | 2340 | TAGTCAATC | 3092 |
| | | | | UGAGCUGGG | | TGAGCTGGG | |
| | | | | CUCAGCU | | CTCAGCT | |
| PTPN11 | EXON | + | chr12: 112506681-112506706 | CUGGGCUGU | 2341 | CTGGGCTGT | 3093 |
| | | | | UCUUCUGCCA | | TCTTCTGCCA | |
| | | | | GCCUGC | | GCCTGC | |
| PTPN11 | EXON | + | chr12: 112506684-112506709 | GGCUGUUCU | 2342 | GGCTGTTCTT | 3094 |
| | | | | UCUGCCAGCC | | CTGCCAGCC | |
| | | | | UGCAGG | | TGCAGG | |
| PTPN11 | EXON | + | chr12: 112506696-112506721 | GCCAGCCUGC | 2343 | GCCAGCCTG | 3095 |
| | | | | AGGUGGCCA | | CAGGTGGCC | |
| | | | | CUCAUG | | ACTCATG | |
| PTPN11 | EXON | + | chr12: 112506704-112506729 | GCAGGUGGC | 2344 | GCAGGTGGC | 3096 |
| | | | | CACUCAUGU | | CACTCATGT | |
| | | | | GGUCAGC | | GGTCAGC | |
| PTPN11 | EXON | + | chr12: 112506708-112506733 | GUGGCCACUC | 2345 | GTGGCCACT | 3097 |
| | | | | AUGUGGUCA | | CATGTGGTC | |
| | | | | GCAGGU | | AGCAGGT | |
| PTPN11 | EXON | + | chr12: 112506711-112506736 | GCCACUCAUG | 2346 | GCCACTCAT | 3098 |
| | | | | UGGUCAGCA | | GTGGTCAGC | |
| | | | | GGUCGG | | AGGTCGG | |
| PTPN11 | EXON | + | chr12: 112506720-112506745 | GUGGUCAGC | 2347 | GTGGTCAGC | 3099 |
| | | | | AGGUCGGCG | | AGGTCGGCG | |
| | | | | GAGAGAC | | GAGAGAC | |
| PTPN11 | EXON | + | chr12: 112506721-112506746 | UGGUCAGCA | 2348 | TGGTCAGCA | 3100 |
| | | | | GGUCGGCGG | | GGTCGGCGG | |
| | | | | AGAGACU | | AGAGACT | |
| PTPN11 | EXON | + | chr12: 112506725-112506750 | CAGCAGGUC | 2349 | CAGCAGGTC | 3101 |
| | | | | GGCGGAGAG | | GGCGGAGAG | |
| | | | | ACUGGGA | | ACTGGGA | |
| PTPN11 | EXON | + | chr12: 112506729-112506754 | AGGUCGGCG | 2350 | AGGTCGGCG | 3102 |
| | | | | GAGAGACUG | | GAGAGACTG | |
| | | | | GGAUGGC | | GGATGGC | |
| PTPN11 | EXON | + | chr12: 112506730-112506755 | GGUCGGCGG | 2351 | GGTCGGCGG | 3103 |
| | | | | AGAGACUGG | | AGAGACTGG | |
| | | | | GAUGGCU | | GATGGCT | |
| PTPN11 | EXON | + | chr12: 112506788-112506813 | UCCUUCUUCG | 2352 | TCCTTCTTCG | 3104 |
| | | | | UGUAGUCUC | | TGTAGTCTCT | |
| | | | | UUUCAG | | TTCAG | |
| PTPN11 | EXON | + | chr12: 112506793-112506818 | CUUCGUGUA | 2353 | CTTCGTGTA | 3105 |
| | | | | GUCUCUUUC | | GTCTCTTTCA | |
| | | | | AGUGGCC | | GTGGCC | |
| PTPN11 | EXON | + | chr12: 112506797-112506822 | GUGUAGUCU | 2354 | GTGTAGTCT | 3106 |
| | | | | CUUUCAGUG | | CTTTCAGTG | |
| | | | | GCCUGGC | | GCCTGGC | |
| PTPN11 | EXON | + | chr12: 112506801-112506826 | AGUCUCUUU | 2355 | AGTCTCTTTC | 3107 |
| | | | | CAGUGGCCU | | AGTGGCCTG | |
| | | | | GGCUGGC | | GCTGGC | |
| PTPN11 | EXON | + | chr12: 112506802-112506827 | GUCUCUUUC | 2356 | GTCTCTTTCA | 3108 |
| | | | | AGUGGCCUG | | GTGGCCTGG | |
| | | | | GCUGGCA | | CTGGCA | |
| PTPN11 | EXON | + | chr12: 112506858-112506883 | GCUCCCAAGA | 2357 | GCTCCCAAG | 3109 |
| | | | | GCUCAAAAG | | AGCTCAAAA | |
| | | | | CAGAAA | | GCAGAAA | |
| PTPN11 | EXON | + | chr12: 112506863-112506888 | CAAGAGCUC | 2358 | CAAGAGCTC | 3110 |
| | | | | AAAAGCAGA | | AAAAGCAGA | |
| | | | | AAUGGCC | | AATGGCC | |
| PTPN11 | EXON | + | chr12: 112506966-112506991 | AUGAUGAUG | 2359 | ATGATGATG | 3111 |
| | | | | AUGAUGAUG | | ATGATGATG | |
| | | | | AUGAUGA | | ATGATGA | |
| PTPN11 | EXON | + | chr12: 112506991-112507016 | UGGUUUUUU | 2360 | TGGTTTTTTC | 3112 |
| | | | | CUAAUCAGA | | TAATCAGAA | |
| | | | | AGAAAGC | | GAAAGC | |
| PTPN11 | EXON | + | chr12: 112506992-112507017 | GGUUUUUUC | 2361 | GGTTTTTTCT | 3113 |
| | | | | UAAUCAGAA | | AATCAGAAG | |
| | | | | GAAAGCU | | AAAGCT | |
| PTPN11 | EXON | + | chr12: 112506993-112507018 | GUUUUUUCU | 2362 | GTTTTTTCTA | 3114 |
| | | | | AAUCAGAAG | | ATCAGAAGA | |
| | | | | AAAGCUG | | AAGCTG | |
| PTPN11 | EXON | + | chr12: 112507047-112507072 | ACAAGCCCAG | 2363 | ACAAGCCCA | 3115 |
| | | | | CUCAGAUUC | | GCTCAGATT | |
| | | | | AAGAAA | | CAAGAAA | |
| PTPN11 | EXON | + | chr12: 112507048-112507073 | CAAGCCCAGC | 2364 | CAAGCCCAG | 3116 |
| | | | | UCAGAUUCA | | CTCAGATTC | |
| | | | | AGAAAA | | AAGAAAA | |
| PTPN11 | EXON | + | chr12: 112507061-112507086 | GAUUCAAGA | 2365 | GATTCAAGA | 3117 |
| | | | | AAAGGGUGU | | AAAGGGTGT | |
| | | | | GAAGUAG | | GAAGTAG | |
| PTPN11 | EXON | + | chr12: 112507074-112507099 | GGUGUGAAG | 2366 | GGTGTGAAG | 3118 |
| | | | | UAGAGGUGC | | TAGAGGTGC | |
| | | | | AGUUAAG | | AGTTAAG | |
| PTPN11 | EXON | + | chr12: 112507075-112507100 | GUGUGAAGU | 2367 | GTGTGAAGT | 3119 |
| | | | | AGAGGUGCA | | AGAGGTGCA | |
| | | | | GUUAAGU | | GTTAAGT | |
| PTPN11 | EXON | + | chr12: 112507076-112507101 | UGUGAAGUA | 2368 | TGTGAAGTA | 3120 |
| | | | | GAGGUGCAG | | GAGGTGCAG | |
| | | | | UUAAGUG | | TTAAGTG | |
| PTPN11 | EXON | + | chr12: 112507077-112507102 | GUGAAGUAG | 2369 | GTGAAGTAG | 3121 |
| | | | | AGGUGCAGU | | AGGTGCAGT | |
| | | | | UAAGUGG | | TAAGTGG | |
| PTPN11 | EXON | + | chr12: 112507078-112507103 | UGAAGUAGA | 2370 | TGAAGTAGA | 3122 |
| | | | | GGUGCAGUU | | GGTGCAGTT | |
| | | | | AAGUGGG | | AAGTGGG | |
| PTPN11 | EXON | + | chr12: 112507097-112507122 | AGUGGGGGG | 2371 | AGTGGGGGG | 3123 |
| | | | | CCACUAGUCU | | CCACTAGTC | |
| | | | | AACAGA | | TAACAGA | |
| PTPN11 | EXON | + | chr12: 112507115-112507140 | UAACAGACG | 2372 | TAACAGACG | 3124 |
| | | | | GUCACAACCA | | GTCACAACC | |
| | | | | GUGCCA | | AGTGCCA | |
| PTPN11 | EXON | + | chr12: 112507125-112507150 | UCACAACCAG | 2373 | TCACAACCA | 3125 |
| | | | | UGCCAUGGA | | GTGCCATGG | |
| | | | | AAACCA | | AAAACCA | |
| PTPN11 | EXON | + | chr12: 112507160-112507185 | CAAAAGCAG | 2374 | CAAAAGCAG | 3126 |
| | | | | AAGUUGCUA | | AAGTTGCTA | |
| | | | | GUGACCU | | GTGACCT | |
| PTPN11 | EXON | + | chr12: 112507161-112507186 | AAAAGCAGA | 2375 | AAAAGCAGA | 3127 |
| | | | | AGUUGCUAG | | AGTTGCTAG | |
| | | | | UGACCUU | | TGACCTT | |
| PTPN11 | EXON | + | chr12: 112507187-112507212 | GGAAGCCGA | 2376 | GGAAGCCGA | 3128 |
| | | | | AGCUGCUUA | | AGCTGCTTA | |
| | | | | CAGUAGC | | CAGTAGC | |
| PTPN11 | EXON | + | chr12: 112507188-112507213 | GAAGCCGAA | 2377 | GAAGCCGAA | 3129 |
| | | | | GCUGCUUAC | | GCTGCTTAC | |
| | | | | AGUAGCU | | AGTAGCT | |
| PTPN11 | EXON | + | chr12: 112507223-112507248 | GAAAGUCAG | 2378 | GAAAGTCAG | 3130 |
| | | | | ACUAAGAAA | | ACTAAGAAA | |
| | | | | UAAAGAG | | TAAAGAG | |
| PTPN11 | EXON | + | chr12: 112507224-112507249 | AAAGUCAGA | 2379 | AAAGTCAGA | 3131 |
| | | | | CUAAGAAAU | | CTAAGAAAT | |
| | | | | AAAGAGA | | AAAGAGA | |
| PTPN11 | EXON | + | chr12: 112507275-112507300 | UUUCUGCUA | 2380 | TTTCTGCTAG | 3132 |
| | | | | GCCCUGAGCC | | CCCTGAGCC | |
| | | | | UAUUUU | | TATTTT | |
| PTPN11 | EXON | + | chr12: 112507288-112507313 | UGAGCCUAU | 2381 | TGAGCCTAT | 3133 |
| | | | | UUUUGGAAC | | TTTTGGAAC | |
| | | | | CAGCACU | | CAGCACT | |
| PTPN11 | EXON | + | chr12: 112507289-112507314 | GAGCCUAUU | 2382 | GAGCCTATT | 3134 |
| | | | | UUUGGAACC | | TTTGGAACC | |
| | | | | AGCACUU | | AGCACTT | |
| PTPN11 | EXON | + | chr12: 112507290-112507315 | AGCCUAUUU | 2383 | AGCCTATTTT | 3135 |
| | | | | UUGGAACCA | | TGGAACCAG | |
| | | | | GCACUUG | | CACTTG | |
| PTPN11 | EXON | + | chr12: 112507307-112507332 | AGCACUUGG | 2384 | AGCACTTGG | 3136 |
| | | | | GGAAACUGA | | GGAAACTGA | |
| | | | | UCUUGUG | | TCTTGTG | |
| PTPN11 | EXON | + | chr12: 112507311-112507336 | CUUGGGGAA | 2385 | CTTGGGGAA | 3137 |
| | | | | ACUGAUCUU | | ACTGATCTT | |
| | | | | GUGAGGA | | GTGAGGA | |
| PTPN11 | EXON | + | chr12: 112507322-112507347 | UGAUCUUGU | 2386 | TGATCTTGT | 3138 |
| | | | | GAGGAUGGA | | GAGGATGGA | |
| | | | | UGUGUUU | | TGTGTTT | |
| PTPN11 | EXON | + | chr12: 112507323-112507348 | GAUCUUGUG | 2387 | GATCTTGTG | 3139 |
| | | | | AGGAUGGAU | | AGGATGGAT | |
| | | | | GUGUUUA | | GTGTTTA | |
| PTPN11 | EXON | + | chr12: 112507330-112507355 | UGAGGAUGG | 2388 | TGAGGATGG | 3140 |
| | | | | AUGUGUUUA | | ATGTGTTTA | |
| | | | | GGGACAC | | GGGACAC | |
| PTPN11 | EXON | + | chr12: 112507331-112507356 | GAGGAUGGA | 2389 | GAGGATGGA | 3141 |
| | | | | UGUGUUUAG | | TGTGTTTAG | |
| | | | | GGACACA | | GGACACA | |
| PTPN11 | EXON | + | chr12: 112507358-112507383 | GCUUUUGAG | 2390 | GCTTTTGAG | 3142 |
| | | | | AGCAGCACCA | | AGCAGCACC | |
| | | | | CCCCAC | | ACCCCAC | |
| PTPN11 | EXON | + | chr12: 112507359-112507384 | CUUUUGAGA | 2391 | CTTTTGAGA | 3143 |
| | | | | GCAGCACCAC | | GCAGCACCA | |
| | | | | CCCACU | | CCCCACT | |
| PTPN11 | EXON | + | chr12: 112507360-112507385 | UUUUGAGAG | 2392 | TTTTGAGAG | 3144 |
| | | | | CAGCACCACC | | CAGCACCAC | |
| | | | | CCACUG | | CCCACTG | |
| PTPN11 | EXON | + | chr12: 112507375-112507400 | CACCCCACUG | 2393 | CACCCCACT | 3145 |
| | | | | GGGCAUCCCC | | GGGGCATCC | |
| | | | | AGACU | | CCAGACT | |
| PTPN11 | EXON | + | chr12: 112507376-112507401 | ACCCCACUGG | 2394 | ACCCCACTG | 3146 |
| | | | | GGCAUCCCCA | | GGGCATCCC | |
| | | | | GACUU | | CAGACTT | |
| PTPN11 | EXON | + | chr12: 112507404-112507429 | AAACGUGAC | 2395 | AAACGTGAC | 3147 |
| | | | | UCUUUCUUA | | TCTTTCTTAA | |
| | | | | AUGCCAC | | TGCCAC | |
| PTPN11 | EXON | + | chr12: 112507405-112507430 | AACGUGACU | 2396 | AACGTGACT | 3148 |
| | | | | CUUUCUUAA | | CTTTCTTAAT | |
| | | | | UGCCACU | | GCCACT | |
| PTPN11 | EXON | + | chr12: 112507416-112507441 | UUCUUAAUG | 2397 | TTCTTAATGC | 3149 |
| | | | | CCACUGGGU | | CACTGGGTT | |
| | | | | UUUAGUC | | TTAGTC | |
| PTPN11 | EXON | + | chr12: 112507430-112507455 | GGGUUUUAG | 2398 | GGGTTTTAG | 3150 |
| | | | | UCAGGCCACA | | TCAGGCCAC | |
| | | | | GUGAGA | | AGTGAGA | |
| PTPN11 | EXON | + | chr12: 112507445-112507470 | CACAGUGAG | 2399 | CACAGTGAG | 3151 |
| | | | | AAGGAACAG | | AAGGAACAG | |
| | | | | CCCUAAC | | CCCTAAC | |
| PTPN11 | EXON | + | chr12: 112507457-112507482 | GAACAGCCCU | 2400 | GAACAGCCC | 3152 |
| | | | | AACAGGCCUC | | TAACAGGCC | |
| | | | | CAGCC | | TCCAGCC | |
| PTPN11 | EXON | + | chr12: 112507571-112507596 | GCCUCAUAU | 2401 | GCCTCATAT | 3153 |
| | | | | GUUGAAUCA | | GTTGAATCA | |
| | | | | UCCAGUG | | TCCAGTG | |
| PTPN11 | EXON | + | chr12: 112507595-112507620 | GCGGAUAUU | 2402 | GCGGATATT | 3154 |
| | | | | UCAAUGAAA | | TCAATGAAA | |
| | | | | AUAUCAU | | ATATCAT | |
| PTPN11 | EXON | + | chr12: 112507611-112507636 | AAAUAUCAU | 2403 | AAATATCAT | 3155 |
| | | | | UGGUUGACU | | TGGTTGACT | |
| | | | | UUUGUGA | | TTTGTGA | |
| PTPN11 | EXON | + | chr12: 112507625-112507650 | GACUUUUGU | 2404 | GACTTTTGT | 3156 |
| | | | | GAUGGUAAU | | GATGGTAAT | |
| | | | | AAUGCUA | | AATGCTA | |
| PTPN11 | EXON | + | chr12: 112507647-112507672 | CUAUGGCAU | 2405 | CTATGGCAT | 3157 |
| | | | | CUUUGCCAU | | CTTTGCCAT | |
| | | | | GAAGUUG | | GAAGTTG | |
| PTPN11 | EXON | + | chr12: 112507656-112507681 | CUUUGCCAU | 2406 | CTTTGCCAT | 3158 |
| | | | | GAAGUUGUG | | GAAGTTGTG | |
| | | | | GCCUCCU | | GCCTCCT | |
| PTPN11 | EXON | + | chr12: 112507672-112507697 | UGGCCUCCUU | 2407 | TGGCCTCCTT | 3159 |
| | | | | GGAUUCUUC | | GGATTCTTCT | |
| | | | | UGACUU | | GACTT | |
| PTPN11 | EXON | + | chr12: 112507683-112507708 | GAUUCUUCU | 2408 | GATTCTTCTG | 3160 |
| | | | | GACUUUGGC | | ACTTTGGCTT | |
| | | | | UUCUGAA | | CTGAA | |
| PTPN11 | EXON | + | chr12: 112507687-112507712 | CUUCUGACU | 2409 | CTTCTGACTT | 3161 |
| | | | | UUGGCUUCU | | TGGCTTCTG | |
| | | | | GAAAGGA | | AAAGGA | |
| PTPN11 | EXON | + | chr12: 112507704-112507729 | UGAAAGGAA | 2410 | TGAAAGGAA | 3162 |
| | | | | GGCCUAGAU | | GGCCTAGAT | |
| | | | | CCAGCCC | | CCAGCCC | |
| PTPN11 | EXON | + | chr12: 112507707-112507732 | AAGGAAGGC | 2411 | AAGGAAGGC | 3163 |
| | | | | CUAGAUCCA | | CTAGATCCA | |
| | | | | GCCCUGG | | GCCCTGG | |
| PTPN11 | EXON | + | chr12: 112507723-112507748 | CAGCCCUGGU | 2412 | CAGCCCTGG | 3164 |
| | | | | GGUAGUUCC | | TGGTAGTTC | |
| | | | | UUUCUG | | CTTTCTG | |
| PTPN11 | EXON | + | chr12: 112507747-112507772 | GAGGUCUCU | 2413 | GAGGTCTCT | 3165 |
| | | | | CAGUCCCUUG | | CAGTCCCTT | |
| | | | | AGACUU | | GAGACTT | |
| PTPN11 | EXON | + | chr12: 112507748-112507773 | AGGUCUCUC | 2414 | AGGTCTCTC | 3166 |
| | | | | AGUCCCUUG | | AGTCCCTTG | |
| | | | | AGACUUU | | AGACTTT | |
| PTPN11 | EXON | + | chr12: 112507749-112507774 | GGUCUCUCA | 2415 | GGTCTCTCA | 3167 |
| | | | | GUCCCUUGA | | GTCCCTTGA | |
| | | | | GACUUUG | | GACTTTG | |
| PTPN11 | EXON | + | chr12: 112507757-112507782 | AGUCCCUUG | 2416 | AGTCCCTTG | 3168 |
| | | | | AGACUUUGG | | AGACTTTGG | |
| | | | | GGUAGUU | | GGTAGTT | |
| PTPN11 | EXON | + | chr12: 112507843-112507868 | UGAACUUUG | 2417 | TGAACTTTG | 3169 |
| | | | | AAUUGCUUC | | AATTGCTTC | |
| | | | | AGAACAC | | AGAACAC | |
| PTPN11 | EXON | + | chr12: 112507848-112507873 | UUUGAAUUG | 2418 | TTTGAATTG | 3170 |
| | | | | CUUCAGAAC | | CTTCAGAAC | |
| | | | | ACAGGUG | | ACAGGTG | |
| PTPN11 | EXON | + | chr12: 112507856-112507881 | GCUUCAGAA | 2419 | GCTTCAGAA | 3171 |
| | | | | CACAGGUGU | | CACAGGTGT | |
| | | | | GGCCUGA | | GGCCTGA | |
| PTPN11 | EXON | + | chr12: 112507871-112507896 | UGUGGCCUG | 2420 | TGTGGCCTG | 3172 |
| | | | | AAGGUAUUC | | AAGGTATTC | |
| | | | | CCUUAUU | | CCTTATT | |
| PTPN11 | EXON | + | chr12: 112507872-112507897 | GUGGCCUGA | 2421 | GTGGCCTGA | 3173 |
| | | | | AGGUAUUCC | | AGGTATTCC | |
| | | | | CUUAUUA | | CTTATTA | |
| PTPN11 | EXON | + | chr12: 112508001-112508026 | CAUCGACUCA | 2422 | CATCGACTC | 3174 |
| | | | | UUCUCCAUU | | ATTCTCCATT | |
| | | | | UUGCUU | | TTGCTT | |
| PTPN11 | EXON | + | chr12: 112508028-112508053 | GUUUUGUCU | 2423 | GTTTTGTCTT | 3175 |
| | | | | UGACUUGAC | | GACTTGACT | |
| | | | | UUGACUU | | TGACTT | |
| PTPN11 | EXON | + | chr12: 112508029-112508054 | UUUUGUCUU | 2424 | TTTTGTCTTG | 3176 |
| | | | | GACUUGACU | | ACTTGACTT | |
| | | | | UGACUUU | | GACTTT | |
| PTPN11 | EXON | + | chr12: 112508030-112508055 | UUUGUCUUG | 2425 | TTTGTCTTGA | 3177 |
| | | | | ACUUGACUU | | CTTGACTTG | |
| | | | | GACUUUG | | ACTTTG | |
| PTPN11 | EXON | + | chr12: 112508031-112508056 | UUGUCUUGA | 2426 | TTGTCTTGAC | 3178 |
| | | | | CUUGACUUG | | TTGACTTGA | |
| | | | | ACUUUGG | | CTTTGG | |
| PTPN11 | EXON | + | chr12: 112508135-112508160 | AGAUCAGUU | 2427 | AGATCAGTT | 3179 |
| | | | | GCUUUUAUA | | GCTTTTATAC | |
| | | | | CUCAGAA | | TCAGAA | |
| PTPN11 | EXON | + | chr12: 112508151-112508176 | UACUCAGAA | 2428 | TACTCAGAA | 3180 |
| | | | | UGGAAAUAC | | TGGAAATAC | |
| | | | | CUGAUCU | | CTGATCT | |
| PTPN11 | EXON | + | chr12: 112508200-112508225 | GAUUUCAUU | 2429 | GATTTCATTT | 3181 |
| | | | | UAGAUUUCC | | AGATTTCCC | |
| | | | | CUCCACG | | TCCACG | |
| PTPN11 | EXON | + | chr12: 112508234-112508259 | AACUAUCAU | 2430 | AACTATCAT | 3182 |
| | | | | GUUCUUAUG | | GTTCTTATGT | |
| | | | | UAAACUU | | AAACTT | |
| PTPN11 | EXON | + | chr12: 112508240-112508265 | CAUGUUCUU | 2431 | CATGTTCTTA | 3183 |
| | | | | AUGUAAACU | | TGTAAACTT | |
| | | | | UAGGCCA | | AGGCCA | |
| PTPN11 | EXON | + | chr12: 112508263-112508288 | CAAGGCCAG | 2432 | CAAGGCCAG | 3184 |
| | | | | AGUUAUCAU | | AGTTATCAT | |
| | | | | AGUCCCU | | AGTCCCT | |
| PTPN11 | EXON | + | chr12: 112508272-112508297 | AGUUAUCAU | 2433 | AGTTATCAT | 3185 |
| | | | | AGUCCCUAG | | AGTCCCTAG | |
| | | | | GUUGCUA | | GTTGCTA | |
| PTPN11 | EXON | + | chr12: 112508288-112508313 | AGGUUGCUA | 2434 | AGGTTGCTA | 3186 |
| | | | | CGGCUUAUC | | CGGCTTATC | |
| | | | | AUGUGCU | | ATGTGCT | |
| PTPN11 | EXON | + | chr12: 112508295-112508320 | UACGGCUUA | 2435 | TACGGCTTA | 3187 |
| | | | | UCAUGUGCU | | TCATGTGCTT | |
| | | | | UGGUAAA | | GGTAAA | |
| PTPN11 | EXON | + | chr12: 112508305-112508330 | CAUGUGCUU | 2436 | CATGTGCTT | 3188 |
| | | | | GGUAAAAGG | | GGTAAAAGG | |
| | | | | UGAUCGC | | TGATCGC | |
| PTPN11 | EXON | + | chr12: 112508336-112508361 | UCAGACGAG | 2437 | TCAGACGAG | 3189 |
| | | | | UUUACUUUA | | TTTACTTTAC | |
| | | | | CAUGAGA | | ATGAGA | |
| PTPN11 | EXON | + | chr12: 112508343-112508368 | AGUUUACUU | 2438 | AGTTTACTTT | 3190 |
| | | | | UACAUGAGA | | ACATGAGAT | |
| | | | | UGGAAUC | | GGAATC | |
| PTPN11 | EXON | + | chr12: 112508351-112508376 | UUACAUGAG | 2439 | TTACATGAG | 3191 |
| | | | | AUGGAAUCA | | ATGGAATCA | |
| | | | | GGCAGAG | | GGCAGAG | |
| PTPN11 | EXON | + | chr12: 112508355-112508380 | AUGAGAUGG | 2440 | ATGAGATGG | 3192 |
| | | | | AAUCAGGCA | | AATCAGGCA | |
| | | | | GAGAGGC | | GAGAGGC | |
| PTPN11 | EXON | + | chr12: 112508356-112508381 | UGAGAUGGA | 2441 | TGAGATGGA | 3193 |
| | | | | AUCAGGCAG | | ATCAGGCAG | |
| | | | | AGAGGCU | | AGAGGCT | |
| PTPN11 | EXON | + | chr12: 112508363-112508388 | GAAUCAGGC | 2442 | GAATCAGGC | 3194 |
| | | | | AGAGAGGCU | | AGAGAGGCT | |
| | | | | GGGAUGA | | GGGATGA | |
| PTPN11 | EXON | + | chr12: 112508376-112508401 | AGGCUGGGA | 2443 | AGGCTGGGA | 3195 |
| | | | | UGAUGGAGA | | TGATGGAGA | |
| | | | | AAGCUCG | | AAGCTCG | |
| PTPN11 | EXON | + | chr12: 112508401-112508426 | AGGUGAAGU | 2444 | AGGTGAAGT | 3196 |
| | | | | UUUAAAAAA | | TTTAAAAAA | |
| | | | | AAAGUUG | | AAAGTTG | |
| PTPN11 | EXON | + | chr12: 112508406-112508431 | AAGUUUUAA | 2445 | AAGTTTTAA | 3197 |
| | | | | AAAAAAAGU | | AAAAAAAGT | |
| | | | | UGUGGAA | | TGTGGAA | |
| PTPN11 | EXON | + | chr12: 112508421-112508446 | AGUUGUGGA | 2446 | AGTTGTGGA | 3198 |
| | | | | AAGGAAAGU | | AAGGAAAGT | |
| | | | | UCCAAAG | | TCCAAAG | |
| PTPN11 | EXON | + | chr12: 112508424-112508449 | UGUGGAAAG | 2447 | TGTGGAAAG | 3199 |
| | | | | GAAAGUUCC | | GAAAGTTCC | |
| | | | | AAAGAGG | | AAAGAGG | |
| PTPN11 | EXON | + | chr12: 112508433-112508458 | GAAAGUUCC | 2448 | GAAAGTTCC | 3200 |
| | | | | AAAGAGGUG | | AAAGAGGTG | |
| | | | | GUUUCUG | | GTTTCTG | |
| PTPN11 | EXON | + | chr12: 112508450-112508475 | GGUUUCUGA | 2449 | GGTTTCTGA | 3201 |
| | | | | GGAAGUCAG | | GGAAGTCAG | |
| | | | | AGCGCCC | | AGCGCCC | |
| PTPN11 | EXON | + | chr12: 112508451-112508476 | GUUUCUGAG | 2450 | GTTTCTGAG | 3202 |
| | | | | GAAGUCAGA | | GAAGTCAGA | |
| | | | | GCGCCCA | | GCGCCCA | |
| PTPN11 | EXON | + | chr12: 112508470-112508495 | CGCCCAGGGC | 2451 | CGCCCAGGG | 3203 |
| | | | | CAGAGCAGU | | CCAGAGCAG | |
| | | | | CAGUAA | | TCAGTAA | |
| PTPN11 | EXON | + | chr12: 112508471-112508496 | GCCCAGGGCC | 2452 | GCCCAGGGC | 3204 |
| | | | | AGAGCAGUC | | CAGAGCAGT | |
| | | | | AGUAAU | | CAGTAAT | |
| PTPN11 | EXON | + | chr12: 112508480-112508505 | CAGAGCAGU | 2453 | CAGAGCAGT | 3205 |
| | | | | CAGUAAUGG | | CAGTAATGG | |
| | | | | GUGAAUG | | GTGAATG | |
| PTPN11 | EXON | + | chr12: 112508488-112508513 | UCAGUAAUG | 2454 | TCAGTAATG | 3206 |
| | | | | GGUGAAUGA | | GGTGAATGA | |
| | | | | GGUUGUU | | GGTTGTT | |
| PTPN11 | EXON | + | chr12: 112508496-112508521 | GGGUGAAUG | 2455 | GGGTGAATG | 3207 |
| | | | | AGGUUGUUU | | AGGTTGTTT | |
| | | | | GGAAAGU | | GGAAAGT | |
| PTPN11 | EXON | + | chr12: 112508512-112508537 | UUGGAAAGU | 2456 | TTGGAAAGT | 3208 |
| | | | | CGGUGUGAC | | CGGTGTGAC | |
| | | | | AGACACA | | AGACACA | |
| PTPN11 | EXON | + | chr12: 112508530-112508555 | AGACACAUG | 2457 | AGACACATG | 3209 |
| | | | | GAUGCCAUC | | GATGCCATC | |
| | | | | UACUUCU | | TACTTCT | |
| PTPN11 | EXON | + | chr12: 112508537-112508562 | UGGAUGCCA | 2458 | TGGATGCCA | 3210 |
| | | | | UCUACUUCU | | TCTACTTCTA | |
| | | | | AGGUUGC | | GGTTGC | |
| PTPN11 | EXON | + | chr12: 112508540-112508565 | AUGCCAUCU | 2459 | ATGCCATCT | 3211 |
| | | | | ACUUCUAGG | | ACTTCTAGG | |
| | | | | UUGCUGG | | TTGCTGG | |
| PTPN11 | EXON | + | chr12: 112508541-112508566 | UGCCAUCUAC | 2460 | TGCCATCTA | 3212 |
| | | | | UUCUAGGUU | | CTTCTAGGTT | |
| | | | | GCUGGU | | GCTGGT | |
| PTPN11 | EXON | + | chr12: 112508577-112508602 | AUGCACAAU | 2461 | ATGCACAAT | 3213 |
| | | | | AUUCCAUAG | | ATTCCATAG | |
| | | | | CUCACUG | | CTCACTG | |
| PTPN11 | EXON | + | chr12: 112508599-112508624 | CUGAGGAUU | 2462 | CTGAGGATT | 3214 |
| | | | | UUAAAAUUA | | TTAAAATTA | |
| | | | | UAAGCAU | | TAAGCAT | |
| PTPN11 | EXON | + | chr12: 112508613-112508638 | AUUAUAAGC | 2463 | ATTATAAGC | 3215 |
| | | | | AUAGGAUUU | | ATAGGATTT | |
| | | | | UAUAUUU | | TATATTT | |
| PTPN11 | EXON | + | chr12: 112508614-112508639 | UUAUAAGCA | 2464 | TTATAAGCA | 3216 |
| | | | | UAGGAUUUU | | TAGGATTTT | |
| | | | | AUAUUUU | | ATATTTT | |
| PTPN11 | EXON | + | chr12: 112508615-112508640 | UAUAAGCAU | 2465 | TATAAGCAT | 3217 |
| | | | | AGGAUUUUA | | AGGATTTTA | |
| | | | | UAUUUUG | | TATTTTG | |
| PTPN11 | EXON | + | chr12: 112508631-112508656 | UAUAUUUUG | 2466 | TATATTTTGG | 3218 |
| | | | | GGGUGAAAG | | GGTGAAAGA | |
| | | | | AAUUAUC | | ATTATC | |
| PTPN11 | EXON | + | chr12: 112508640-112508665 | GGGUGAAAG | 2467 | GGGTGAAAG | 3219 |
| | | | | AAUUAUCUG | | AATTATCTG | |
| | | | | GCACAUU | | GCACATT | |
| PTPN11 | EXON | + | chr12: 112508646-112508671 | AAGAAUUAU | 2468 | AAGAATTAT | 3220 |
| | | | | CUGGCACAU | | CTGGCACAT | |
| | | | | UAGGUAU | | TAGGTAT | |
| PTPN11 | EXON | + | chr12: 112508707-112508732 | AUAACUUUU | 2469 | ATAACTTTTT | 3221 |
| | | | | UUUAAAAAA | | TTAAAAAAA | |
| | | | | AACUAAA | | ACTAAA | |
| PTPN11 | EXON | + | chr12: 112508728-112508753 | UAAAAGGCG | 2470 | TAAAAGGCG | 3222 |
| | | | | CUUCAUGUCC | | CTTCATGTCC | |
| | | | | AGUGUG | | AGTGTG | |
| PTPN11 | EXON | + | chr12: 112508746-112508771 | CAGUGUGUG | 2471 | CAGTGTGTG | 3223 |
| | | | | GCCCUUCUGA | | GCCCTTCTG | |
| | | | | AACUUA | | AAACTTA | |
| PTPN11 | EXON | + | chr12: 112508770-112508795 | AUGGUCAUC | 2472 | ATGGTCATC | 3224 |
| | | | | UCUCCCACUG | | TCTCCCACT | |
| | | | | AAACCA | | GAAACCA | |
| PTPN11 | EXON | + | chr12: 112508785-112508810 | ACUGAAACC | 2473 | ACTGAAACC | 3225 |
| | | | | AAGGUCUUU | | AAGGTCTTT | |
| | | | | UCAAAUG | | TCAAATG | |
| PTPN11 | EXON | + | chr12: 112508793-112508818 | CAAGGUCUU | 2474 | CAAGGTCTT | 3226 |
| | | | | UUCAAAUGU | | TTCAAATGT | |
| | | | | GGCUAAA | | GGCTAAA | |
| PTPN11 | EXON | + | chr12: 112508794-112508819 | AAGGUCUUU | 2475 | AAGGTCTTT | 3227 |
| | | | | UCAAAUGUG | | TCAAATGTG | |
| | | | | GCUAAAU | | GCTAAAT | |
| PTPN11 | EXON | + | chr12: 112508795-112508820 | AGGUCUUUU | 2476 | AGGTCTTTTC | 3228 |
| | | | | CAAAUGUGG | | AAATGTGGC | |
| | | | | CUAAAUG | | TAAATG | |
| PTPN11 | EXON | + | chr12: 112508801-112508826 | UUUCAAAUG | 2477 | TTTCAAATG | 3229 |
| | | | | UGGCUAAAU | | TGGCTAAAT | |
| | | | | GGGGAUG | | GGGGATG | |
| PTPN11 | EXON | + | chr12: 112508809-112508834 | GUGGCUAAA | 2478 | GTGGCTAAA | 3230 |
| | | | | UGGGGAUGA | | TGGGGATGA | |
| | | | | GGAGACA | | GGAGACA | |
| PTPN11 | EXON | + | chr12: 112508810-112508835 | UGGCUAAAU | 2479 | TGGCTAAAT | 3231 |
| | | | | GGGGAUGAG | | GGGGATGAG | |
| | | | | GAGACAC | | GAGACAC | |
| PTPN11 | EXON | + | chr12: 112508814-112508839 | UAAAUGGGG | 2480 | TAAATGGGG | 3232 |
| | | | | AUGAGGAGA | | ATGAGGAGA | |
| | | | | CACGGGU | | CACGGGT | |
| PTPN11 | EXON | + | chr12: 112508824-112508849 | UGAGGAGAC | 2481 | TGAGGAGAC | 3233 |
| | | | | ACGGGUAGG | | ACGGGTAGG | |
| | | | | ACUUUCU | | ACTTTCT | |
| PTPN11 | EXON | + | chr12: 112508860-112508885 | CAUUCUUUA | 2482 | CATTCTTTAA | 3234 |
| | | | | AAGAGCCAA | | AGAGCCAAG | |
| | | | | GUUGCUU | | TTGCTT | |
| PTPN11 | EXON | + | chr12: 112508861-112508886 | AUUCUUUAA | 2483 | ATTCTTTAA | 3235 |
| | | | | AGAGCCAAG | | AGAGCCAAG | |
| | | | | UUGCUUC | | TTGCTTC | |
| PTPN11 | EXON | + | chr12: 112508862-112508887 | UUCUUUAAA | 2484 | TTCTTTAAA | 3236 |
| | | | | GAGCCAAGU | | GAGCCAAGT | |
| | | | | UGCUUCG | | TGCTTCG | |
| PTPN11 | EXON | + | chr12: 112508873-112508898 | GCCAAGUUG | 2485 | GCCAAGTTG | 3237 |
| | | | | CUUCGGGGA | | CTTCGGGGA | |
| | | | | AACAGCC | | AACAGCC | |
| PTPN11 | EXON | + | chr12: 112508880-112508905 | UGCUUCGGG | 2486 | TGCTTCGGG | 3238 |
| | | | | GAAACAGCC | | GAAACAGCC | |
| | | | | AGGAAAA | | AGGAAAA | |
| PTPN11 | EXON | + | chr12: 112508899-112508924 | GGAAAAUGG | 2487 | GGAAAATGG | 3239 |
| | | | | UCAAGAUUA | | TCAAGATTA | |
| | | | | UUUUUAG | | TTTTTAG | |
| PTPN11 | EXON | + | chr12: 112508911-112508936 | AGAUUAUUU | 2488 | AGATTATTTT | 3240 |
| | | | | UUAGAGGUU | | TAGAGGTTA | |
| | | | | AUUUUAU | | TTTTAT | |
| PTPN11 | EXON | + | chr12: 112508912-112508937 | GAUUAUUUU | 2489 | GATTATTTTT | 3241 |
| | | | | UAGAGGUUA | | AGAGGTTAT | |
| | | | | UUUUAUU | | TTTATT | |
| PTPN11 | EXON | + | chr12: 112508913-112508938 | AUUAUUUUU | 2490 | ATTATTTTTA | 3242 |
| | | | | AGAGGUUAU | | GAGGTTATT | |
| | | | | UUUAUUG | | TTATTG | |
| PTPN11 | EXON | + | chr12: 112508955-112508980 | UAACAUCUU | 2491 | TAACATCTT | 3243 |
| | | | | GAGUUAUUU | | GAGTTATTTT | |
| | | | | UUAAUUC | | TAATTC | |
| PTPN11 | EXON | + | chr12: 112508956-112508981 | AACAUCUUG | 2492 | AACATCTTG | 3244 |
| | | | | AGUUAUUUU | | AGTTATTTTT | |
| | | | | UAAUUCA | | AATTCA | |
| PTPN11 | EXON | + | chr12: 112508957-112508982 | ACAUCUUGA | 2493 | ACATCTTGA | 3245 |
| | | | | GUUAUUUUU | | GTTATTTTTA | |
| | | | | AAUUCAG | | ATTCAG | |
| PTPN11 | EXON | + | chr12: 112508958-112508983 | CAUCUUGAG | 2494 | CATCTTGAG | 3246 |
| | | | | UUAUUUUUA | | TTATTTTTAA | |
| | | | | AUUCAGG | | TTCAGG | |
| PTPN11 | EXON | + | chr12: 112508964-112508989 | GAGUUAUUU | 2495 | GAGTTATTTT | 3247 |
| | | | | UUAAUUCAG | | TAATTCAGG | |
| | | | | GGGGAUG | | GGGATG | |
| PTPN11 | EXON | + | chr12: 112508969-112508994 | AUUUUUAAU | 2496 | ATTTTTAATT | 3248 |
| | | | | UCAGGGGGA | | CAGGGGGAT | |
| | | | | UGUGGAA | | GTGGAA | |
| PTPN11 | EXON | + | chr12: 112509013-112509038 | GUUUUGUUG | 2497 | GTTTTGTTGT | 3249 |
| | | | | UAGCUUAGU | | AGCTTAGTA | |
| | | | | AUCCAUA | | TCCATA | |
| PTPN11 | EXON | + | chr12: 112509014-112509039 | UUUUGUUGU | 2498 | TTTTGTTGTA | 3250 |
| | | | | AGCUUAGUA | | GCTTAGTAT | |
| | | | | UCCAUAA | | CCATAA | |
| PTPN11 | EXON | + | chr12: 112509076-112509101 | GCAGCUUUU | 2499 | GCAGCTTTT | 3251 |
| | | | | GUUUUCUGU | | GTTTTCTGTA | |
| | | | | AUGUUGU | | TGTTGT | |
| PTPN11 | EXON | + | chr12: 112509077-112509102 | CAGCUUUUG | 2500 | CAGCTTTTGT | 3252 |
| | | | | UUUUCUGUA | | TTTCTGTATG | |
| | | | | UGUUGUU | | TTGTT | |
| PTPN11 | EXON | + | chr12: 112509078-112509103 | AGCUUUUGU | 2501 | AGCTTTTGTT | 3253 |
| | | | | UUUCUGUAU | | TTCTGTATGT | |
| | | | | GUUGUUG | | TGTTG | |
| PTPN11 | EXON | + | chr12: 112509079-112509104 | GCUUUUGUU | 2502 | GCTTTTGTTT | 3254 |
| | | | | UUCUGUAUG | | TCTGTATGTT | |
| | | | | UUGUUGG | | GTTGG | |
| PTPN11 | EXON | + | chr12: 112509108-112509133 | UCAACUUUC | 2503 | TCAACTTTC | 3255 |
| | | | | ACACAUAGC | | ACACATAGC | |
| | | | | AAGCACA | | AAGCACA | |
| PTPN11 | EXON | + | chr12: 112509124-112509149 | GCAAGCACA | 2504 | GCAAGCACA | 3256 |
| | | | | UGGCCUCCCU | | TGGCCTCCC | |
| | | | | GAUGUC | | TGATGTC | |
| PTPN11 | EXON | + | chr12: 112509138-112509163 | UCCCUGAUG | 2505 | TCCCTGATG | 3257 |
| | | | | UCAGGAUGC | | TCAGGATGC | |
| | | | | CUUUGUU | | CTTTGTT | |
| PTPN11 | EXON | + | chr12: 112509254-112509279 | CUAAAAAUU | 2506 | CTAAAAATT | 3258 |
| | | | | UGUUCCUUU | | TGTTCCTTTT | |
| | | | | UUCACUA | | TCACTA | |
| PTPN11 | EXON | + | chr12: 112509255-112509280 | UAAAAAUUU | 2507 | TAAAAATTT | 3259 |
| | | | | GUUCCUUUU | | GTTCCTTTTT | |
| | | | | UCACUAU | | CACTAT | |
| PTPN11 | EXON | + | chr12: 112509269-112509294 | UUUUUCACU | 2508 | TTTTTCACTA | 3260 |
| | | | | AUGGGCAGU | | TGGGCAGTT | |
| | | | | UCACACA | | CACACA | |
| PTPN11 | EXON | + | chr12: 112509290-112509315 | CACAAGGCA | 2509 | CACAAGGCA | 3261 |
| | | | | AAAACUAUU | | AAAACTATT | |
| | | | | GAACAGU | | GAACAGT | |
| PTPN11 | EXON | + | chr12: 112509429-112509454 | UGAUUCUUU | 2510 | TGATTCTTTT | 3262 |
| | | | | UAUUAAUAA | | ATTAATAAA | |
| | | | | AAGCUAA | | AGCTAA | |
| PTPN11 | EXON | + | chr12: 112509430-112509455 | GAUUCUUUU | 2511 | GATTCTTTTA | 3263 |
| | | | | AUUAAUAAA | | TTAATAAAA | |
| | | | | AGCUAAU | | GCTAAT | |
| PTPN11 | EXON | + | chr12: 112509436-112509461 | UUUAUUAAU | 2512 | TTTATTAATA | 3264 |
| | | | | AAAAGCUAA | | AAAGCTAAT | |
| | | | | UGGGAAA | | GGGAAA | |
| PTPN11 | EXON | + | chr12: 112509553-112509578 | UUUAUUGAU | 2513 | TTTATTGATA | 3265 |
| | | | | AAAUCUAUC | | AATCTATCC | |
| | | | | CUUUAAA | | TTTAAA | |
| PTPN11 | EXON | + | chr12: 112509566-112509591 | CUAUCCUUU | 2514 | CTATCCTTTA | 3266 |
| | | | | AAAAGGAAU | | AAAGGAATA | |
| | | | | ACGUUUU | | CGTTTT | |
| PTPN11 | EXON | + | chr12: 112509744-112509769 | AAUAGUUUA | 2515 | AATAGTTTA | 3267 |
| | | | | UGUAGAGAA | | TGTAGAGAA | |
| | | | | ACAUUAG | | ACATTAG | |
| PTPN11 | EXON | + | chr12: 112509775-112509800 | UUAAUUGUC | 2516 | TTAATTGTCT | 3268 |
| | | | | UCCCCACCUA | | CCCCACCTA | |
| | | | | UAUUUA | | TATTTA | |
| PTPN11 | EXON | + | chr12: 112509776-112509801 | UAAUUGUCU | 2517 | TAATTGTCTC | 3269 |
| | | | | CCCCACCUAU | | CCCACCTAT | |
| | | | | AUUUAU | | ATTTAT | |
| PTPN11 | EXON | + | chr12: 112509847-112509872 | AGUAAAAGU | 2518 | AGTAAAAGT | 3270 |
| | | | | GUAUUUGUA | | GTATTTGTA | |
| | | | | AACUGUA | | AACTGTA | |
| PTPN11 | EXON | + | chr12: 112509848-112509873 | GUAAAAGUG | 2519 | GTAAAAGTG | 3271 |
| | | | | UAUUUGUAA | | TATTTGTAA | |
| | | | | ACUGUAU | | ACTGTAT | |
| PTPN11 | EXON | + | chr12: 112509862-112509887 | GUAAACUGU | 2520 | GTAAACTGT | 3272 |
| | | | | AUGGGAACU | | ATGGGAACT | |
| | | | | AAAAAUU | | AAAAATT | |
| PTPN11 | EXON | + | chr12: 112509888-112509913 | GGAAUAAAA | 2521 | GGAATAAAA | 3273 |
| | | | | CCAUUUUCU | | CCATTTTCTT | |
| | | | | UAUAUGA | | ATATGA | |
| PTPN11 | EXON | − | chr12: 112505821-112505846 | GGGAGAGGG | 2522 | GGGAGAGGG | 3274 |
| | | | | UGAAAGUCC | | TGAAAGTCC | |
| | | | | ACAUCUG | | ACATCTG | |
| PTPN11 | EXON | − | chr12: 112505822-112505847 | AGGGAGAGG | 2523 | AGGGAGAGG | 3275 |
| | | | | GUGAAAGUC | | GTGAAAGTC | |
| | | | | CACAUCU | | CACATCT | |
| PTPN11 | EXON | − | chr12: 112505823-112505848 | UAGGGAGAG | 2524 | TAGGGAGAG | 3276 |
| | | | | GGUGAAAGU | | GGTGAAAGT | |
| | | | | CCACAUC | | CCACATC | |
| PTPN11 | EXON | − | chr12: 112505840-112505865 | UCUGUUCUU | 2525 | TCTGTTCTTG | 3277 |
| | | | | GAUCUUUUU | | ATCTTTTTAG | |
| | | | | AGGGAGA | | GGAGA | |
| PTPN11 | EXON | − | chr12: 112505841-112505866 | GUCUGUUCU | 2526 | GTCTGTTCTT | 3278 |
| | | | | UGAUCUUUU | | GATCTTTTTA | |
| | | | | UAGGGAG | | GGGAG | |
| PTPN11 | EXON | − | chr12: 112505846-112505871 | CUUGCGUCU | 2527 | CTTGCGTCT | 3279 |
| | | | | GUUCUUGAU | | GTTCTTGATC | |
| | | | | CUUUUUA | | TTTTTA | |
| PTPN11 | EXON | − | chr12: 112505847-112505872 | UCUUGCGUC | 2528 | TCTTGCGTCT | 3280 |
| | | | | UGUUCUUGA | | GTTCTTGATC | |
| | | | | UCUUUUU | | TTTTT | |
| PTPN11 | EXON | − | chr12: 112505929-112505954 | AUGGUUUCA | 2529 | ATGGTTTCA | 3281 |
| | | | | AAUUUUGCU | | AATTTTGCTT | |
| | | | | UAUCAAA | | ATCAAA | |
| PTPN11 | EXON | − | chr12: 112505953-112505978 | GAGUUAAAA | 2530 | GAGTTAAAA | 3282 |
| | | | | UACAGUGGU | | TACAGTGGT | |
| | | | | CUUUAAA | | CTTTAAA | |
| PTPN11 | EXON | − | chr12: 112505964-112505989 | CAGGUAUUG | 2531 | CAGGTATTG | 3283 |
| | | | | UUGAGUUAA | | TTGAGTTAA | |
| | | | | AAUACAG | | AATACAG | |
| PTPN11 | EXON | − | chr12: 112505988-112506013 | CUGAGGAAA | 2532 | CTGAGGAAA | 3284 |
| | | | | UGAGUAAUU | | TGAGTAATT | |
| | | | | GGGAAGC | | GGGAAGC | |
| PTPN11 | EXON | − | chr12: 112505995-112506020 | UUCUUAUCU | 2533 | TTCTTATCTG | 3285 |
| | | | | GAGGAAAUG | | AGGAAATGA | |
| | | | | AGUAAUU | | GTAATT | |
| PTPN11 | EXON | − | chr12: 112505996-112506021 | CUUCUUAUC | 2534 | CTTCTTATCT | 3286 |
| | | | | UGAGGAAAU | | GAGGAAATG | |
| | | | | GAGUAAU | | AGTAAT | |
| PTPN11 | EXON | − | chr12: 112506010-112506035 | UGUAGAGAU | 2535 | TGTAGAGAT | 3287 |
| | | | | GAUUUCUUC | | GATTTCTTCT | |
| | | | | UUAUCUG | | TATCTG | |
| PTPN11 | EXON | − | chr12: 112506164-112506189 | GGAAAAAAA | 2536 | GGAAAAAAA | 3288 |
| | | | | AAAUUAAAC | | AAATTAAAC | |
| | | | | UGGUUAA | | TGGTTAA | |
| PTPN11 | EXON | − | chr12: 112506165-112506190 | AGGAAAAAA | 2537 | AGGAAAAAA | 3289 |
| | | | | AAAAUUAAA | | AAAATTAAA | |
| | | | | CUGGUUA | | CTGGTTA | |
| PTPN11 | EXON | − | chr12: 112506171-112506196 | ACAAUGAGG | 2538 | ACAATGAGG | 3290 |
| | | | | AAAAAAAAA | | AAAAAAAAA | |
| | | | | AUUAAAC | | ATTAAAC | |
| PTPN11 | EXON | − | chr12: 112506190-112506215 | UUUCUUCUC | 2539 | TTTCTTCTCA | 3291 |
| | | | | AUCAUCCCCA | | TCATCCCCA | |
| | | | | ACAAUG | | ACAATG | |
| PTPN11 | EXON | − | chr12: 112506245-112506270 | UAAAUGAGA | 2540 | TAAATGAGA | 3292 |
| | | | | UUGUUCUCA | | TTGTTCTCAC | |
| | | | | CUUUUCU | | TTTTCT | |
| PTPN11 | EXON | − | chr12: 112506273-112506298 | GAAUUAUCC | 2541 | GAATTATCC | 3293 |
| | | | | ACUACUGGA | | ACTACTGGA | |
| | | | | UACAUGA | | TACATGA | |
| PTPN11 | EXON | − | chr12: 112506284-112506309 | GCCAUCAAA | 2542 | GCCATCAAA | 3294 |
| | | | | AUGAAUUAU | | ATGAATTAT | |
| | | | | CCACUAC | | CCACTAC | |
| PTPN11 | EXON | − | chr12: 112506324-112506349 | CUCAGGCACU | 2543 | CTCAGGCAC | 3295 |
| | | | | GGCUUAAUU | | TGGCTTAAT | |
| | | | | CUCAUU | | TCTCATT | |
| PTPN11 | EXON | − | chr12: 112506340-112506365 | GUCAACUUC | 2544 | GTCAACTTC | 3296 |
| | | | | UGACAGUCU | | TGACAGTCT | |
| | | | | CAGGCAC | | CAGGCAC | |
| PTPN11 | EXON | − | chr12: 112506346-112506371 | GCAAAGGUC | 2545 | GCAAAGGTC | 3297 |
| | | | | AACUUCUGA | | AACTTCTGA | |
| | | | | CAGUCUC | | CAGTCTC | |
| PTPN11 | EXON | − | chr12: 112506367-112506392 | CUAUGACUC | 2546 | CTATGACTC | 3298 |
| | | | | UUUAAUGCC | | TTTAATGCC | |
| | | | | AGUGCAA | | AGTGCAA | |
| PTPN11 | EXON | − | chr12: 112506458-112506483 | AGCCGAACU | 2547 | AGCCGAACT | 3299 |
| | | | | AUAAUUGGU | | ATAATTGGT | |
| | | | | CAACGGC | | CAACGGC | |
| PTPN11 | EXON | − | chr12: 112506462-112506487 | CAACAGCCGA | 2548 | CAACAGCCG | 3300 |
| | | | | ACUAUAAUU | | AACTATAAT | |
| | | | | GGUCAA | | TGGTCAA | |
| PTPN11 | EXON | − | chr12: 112506469-112506494 | UCUCAGUCA | 2549 | TCTCAGTCA | 3301 |
| | | | | ACAGCCGAAC | | ACAGCCGAA | |
| | | | | UAUAAU | | CTATAAT | |
| PTPN11 | EXON | − | chr12: 112506520-112506545 | CAAUUAUUC | 2550 | CAATTATTC | 3302 |
| | | | | AAAUGCAAA | | AAATGCAAA | |
| | | | | GAAAAUA | | GAAAATA | |
| PTPN11 | EXON | − | chr12: 112506581-112506606 | UCGUUGUUU | 2551 | TCGTTGTTTT | 3303 |
| | | | | UGGCGACCA | | GGCGACCAA | |
| | | | | AAAACAC | | AAACAC | |
| PTPN11 | EXON | − | chr12: 112506597-112506622 | AACCCUAUUC | 2552 | AACCCTATT | 3304 |
| | | | | AAACAGUCG | | CAAACAGTC | |
| | | | | UUGUUU | | GTTGTTT | |
| PTPN11 | EXON | − | chr12: 112506620-112506645 | CCAAAAAAA | 2553 | CCAAAAAAA | 3305 |
| | | | | UUCGGUGAU | | TTCGGTGAT | |
| | | | | UUCAAAA | | TTCAAAA | |
| PTPN11 | EXON | − | chr12: 112506621-112506646 | UCCAAAAAA | 2554 | TCCAAAAAA | 3306 |
| | | | | AUUCGGUGA | | ATTCGGTGA | |
| | | | | UUUCAAA | | TTTCAAA | |
| PTPN11 | EXON | − | chr12: 112506646-112506671 | GAGUCUAAC | 2555 | GAGTCTAAC | 3307 |
| | | | | UGAUUGUCA | | TGATTGTCA | |
| | | | | ACCCCCG | | ACCCCCG | |
| PTPN11 | EXON | − | chr12: 112506650-112506675 | GGUCGAGUC | 2556 | GGTCGAGTC | 3308 |
| | | | | UAACUGAUU | | TAACTGATT | |
| | | | | GUCAACC | | GTCAACC | |
| PTPN11 | EXON | − | chr12: 112506651-112506676 | GGGUCGAGU | 2557 | GGGTCGAGT | 3309 |
| | | | | CUAACUGAU | | CTAACTGAT | |
| | | | | UGUCAAC | | TGTCAAC | |
| PTPN11 | EXON | − | chr12: 112506652-112506677 | CGGGUCGAG | 2558 | CGGGTCGAG | 3310 |
| | | | | UCUAACUGA | | TCTAACTGA | |
| | | | | UUGUCAA | | TTGTCAA | |
| PTPN11 | EXON | − | chr12: 112506653-112506678 | UCGGGUCGA | 2559 | TCGGGTCGA | 3311 |
| | | | | GUCUAACUG | | GTCTAACTG | |
| | | | | AUUGUCA | | ATTGTCA | |
| PTPN11 | EXON | − | chr12: 112506700-112506725 | UGGUGUACU | 2560 | TGGTGTACT | 3312 |
| | | | | CACCGGUGG | | CACCGGTGG | |
| | | | | ACGUCCG | | ACGTCCG | |
| PTPN11 | EXON | − | chr12: 112506704-112506729 | CGACUGGUG | 2561 | CGACTGGTG | 3313 |
| | | | | UACUCACCGG | | TACTCACCG | |
| | | | | UGGACG | | GTGGACG | |
| PTPN11 | EXON | − | chr12: 112506715-112506740 | AGGCGGCUG | 2562 | AGGCGGCTG | 3314 |
| | | | | GACGACUGG | | GACGACTGG | |
| | | | | UGUACUC | | TGTACTC | |
| PTPN11 | EXON | − | chr12: 112506773-112506798 | GCUUCUUCCU | 2563 | GCTTCTTCCT | 3315 |
| | | | | CUCUGAGUCC | | CTCTGAGTC | |
| | | | | UGACG | | CTGACG | |
| PTPN11 | EXON | − | chr12: 112506781-112506806 | UCUGAUGUG | 2564 | TCTGATGTG | 3316 |
| | | | | CUUCUUCCUC | | CTTCTTCCTC | |
| | | | | UCUGAG | | TCTGAG | |
| PTPN11 | EXON | − | chr12: 112506792-112506817 | CGGUGACUU | 2565 | CGGTGACTT | 3317 |
| | | | | UCUCUGAUG | | TCTCTGATGT | |
| | | | | UGCUUCU | | GCTTCT | |
| PTPN11 | EXON | − | chr12: 112506819-112506844 | CUCUCCAGAU | 2566 | CTCTCCAGA | 3318 |
| | | | | CGAUGGGAC | | TCGATGGGA | |
| | | | | GGUCGG | | CGGTCGG | |
| PTPN11 | EXON | − | chr12: 112506841-112506866 | AACCCUCGAG | 2567 | AACCCTCGA | 3319 |
| | | | | ACUCGACGU | | GACTCGACG | |
| | | | | ACACUC | | TACACTC | |
| PTPN11 | EXON | − | chr12: 112506864-112506889 | ACCGGUAAA | 2568 | ACCGGTAAA | 3320 |
| | | | | GACGAAAAC | | GACGAAAAC | |
| | | | | UCGAGAA | | TCGAGAA | |
| PTPN11 | EXON | − | chr12: 112506865-112506890 | GACCGGUAA | 2569 | GACCGGTAA | 3321 |
| | | | | AGACGAAAA | | AGACGAAAA | |
| | | | | CUCGAGA | | CTCGAGA | |
| PTPN11 | EXON | − | chr12: 112506889-112506914 | AGACCUGAA | 2570 | AGACCTGAA | 3322 |
| | | | | UUCAAAAGU | | TTCAAAAGT | |
| | | | | CUUCCGG | | CTTCCGG | |
| PTPN11 | EXON | − | chr12: 112506894-112506919 | UGUUAAGAC | 2571 | TGTTAAGAC | 3323 |
| | | | | CUGAAUUCA | | CTGAATTCA | |
| | | | | AAAGUCU | | AAAGTCT | |
| PTPN11 | EXON | − | chr12: 112506912-112506937 | UCAUCUUCCC | 2572 | TCATCTTCCC | 3324 |
| | | | | UGUGACACU | | TGTGACACT | |
| | | | | GUUAAG | | GTTAAG | |
| PTPN11 | EXON | − | chr12: 112506930-112506955 | AGUAGUAGU | 2573 | AGTAGTAGT | 3325 |
| | | | | UAUCUCCCUU | | TATCTCCCTT | |
| | | | | CAUCUU | | CATCTT | |
| PTPN11 | EXON | − | chr12: 112506931-112506956 | UAGUAGUAG | 2574 | TAGTAGTAG | 3326 |
| | | | | UUAUCUCCCU | | TTATCTCCCT | |
| | | | | UCAUCU | | TCATCT | |
| PTPN11 | EXON | − | chr12: 112506941-112506966 | GUAGUAGUA | 2575 | GTAGTAGTA | 3327 |
| | | | | GUAGUAGUA | | GTAGTAGTA | |
| | | | | GUUAUCU | | GTTATCT | |
| PTPN11 | EXON | − | chr12: 112506942-112506967 | AGUAGUAGU | 2576 | AGTAGTAGT | 3328 |
| | | | | AGUAGUAGU | | AGTAGTAGT | |
| | | | | AGUUAUC | | AGTTATC | |
| PTPN11 | EXON | − | chr12: 112507028-112507053 | CGAACACUG | 2577 | CGAACACTG | 3329 |
| | | | | AACAAAUCA | | AACAAATCA | |
| | | | | UUCAUCU | | TTCATCT | |
| PTPN11 | EXON | − | chr12: 112507029-112507054 | CCGAACACUG | 2578 | CCGAACACT | 3330 |
| | | | | AACAAAUCA | | GAACAAATC | |
| | | | | UUCAUC | | ATTCATC | |
| PTPN11 | EXON | − | chr12: 112507055-112507080 | GUGUGGGAA | 2579 | GTGTGGGAA | 3331 |
| | | | | AAGAACUUA | | AAGAACTTA | |
| | | | | GACUCGA | | GACTCGA | |
| PTPN11 | EXON | − | chr12: 112507056-112507081 | AGUGUGGGA | 2580 | AGTGTGGGA | 3332 |
| | | | | AAAGAACUU | | AAAGAACTT | |
| | | | | AGACUCG | | AGACTCG | |
| PTPN11 | EXON | − | chr12: 112507109-112507134 | UGGUUGUGA | 2581 | TGGTTGTGA | 3333 |
| | | | | CCGUCUGUU | | CCGTCTGTT | |
| | | | | AGACUAG | | AGACTAG | |
| PTPN11 | EXON | − | chr12: 112507134-112507159 | UAAUAUCCU | 2582 | TAATATCCTT | 3334 |
| | | | | UGGUUUUCC | | GGTTTTCCAT | |
| | | | | AUGGCAC | | GGCAC | |
| PTPN11 | EXON | − | chr12: 112507140-112507165 | UUUUGCUAA | 2583 | TTTTGCTAAT | 3335 |
| | | | | UAUCCUUGG | | ATCCTTGGTT | |
| | | | | UUUUCCA | | TTCCA | |
| PTPN11 | EXON | − | chr12: 112507150-112507175 | CAACUUCUGC | 2584 | CAACTTCTG | 3336 |
| | | | | UUUUGCUAA | | CTTTTGCTAA | |
| | | | | UAUCCU | | TATCCT | |
| PTPN11 | EXON | − | chr12: 112507185-112507210 | UACUGUAAG | 2585 | TACTGTAAG | 3337 |
| | | | | CAGCUUCGGC | | CAGCTTCGG | |
| | | | | UUCCCA | | CTTCCCA | |
| PTPN11 | EXON | − | chr12: 112507195-112507220 | UUGUCCCAGC | 2586 | TTGTCCCAG | 3338 |
| | | | | UACUGUAAG | | CTACTGTAA | |
| | | | | CAGCUU | | GCAGCTT | |
| PTPN11 | EXON | − | chr12: 112507255-112507280 | AGAAAUCAU | 2587 | AGAAATCAT | 3339 |
| | | | | UCAGGAAGC | | TCAGGAAGC | |
| | | | | UUCUUGA | | TTCTTGA | |
| PTPN11 | EXON | − | chr12: 112507269-112507294 | GGCUCAGGG | 2588 | GGCTCAGGG | 3340 |
| | | | | CUAGCAGAA | | CTAGCAGAA | |
| | | | | AUCAUUC | | ATCATTC | |
| PTPN11 | EXON | − | chr12: 112507288-112507313 | AGUGCUGGU | 2589 | AGTGCTGGT | 3341 |
| | | | | UCCAAAAAU | | TCCAAAAAT | |
| | | | | AGGCUCA | | AGGCTCA | |
| PTPN11 | EXON | − | chr12: 112507289-112507314 | AAGUGCUGG | 2590 | AAGTGCTGG | 3342 |
| | | | | UUCCAAAAA | | TTCCAAAAA | |
| | | | | UAGGCUC | | TAGGCTC | |
| PTPN11 | EXON | − | chr12: 112507295-112507320 | UUCCCCAAGU | 2591 | TTCCCCAAG | 3343 |
| | | | | GCUGGUUCC | | TGCTGGTTC | |
| | | | | AAAAAU | | CAAAAAT | |
| PTPN11 | EXON | − | chr12: 112507308-112507333 | UCACAAGAU | 2592 | TCACAAGAT | 3344 |
| | | | | CAGUUUCCCC | | CAGTTTCCC | |
| | | | | AAGUGC | | CAAGTGC | |
| PTPN11 | EXON | − | chr12: 112507377-112507402 | CAAGUCUGG | 2593 | CAAGTCTGG | 3345 |
| | | | | GGAUGCCCCA | | GGATGCCCC | |
| | | | | GUGGGG | | AGTGGGG | |
| PTPN11 | EXON | − | chr12: 112507380-112507405 | UCCCAAGUCU | 2594 | TCCCAAGTC | 3346 |
| | | | | GGGGAUGCC | | TGGGGATGC | |
| | | | | CCAGUG | | CCCAGTG | |
| PTPN11 | EXON | − | chr12: 112507381-112507406 | UUCCCAAGUC | 2595 | TTCCCAAGT | 3347 |
| | | | | UGGGGAUGC | | CTGGGGATG | |
| | | | | CCCAGU | | CCCCAGT | |
| PTPN11 | EXON | − | chr12: 112507382-112507407 | UUUCCCAAG | 2596 | TTTCCCAAG | 3348 |
| | | | | UCUGGGGAU | | TCTGGGGAT | |
| | | | | GCCCCAG | | GCCCCAG | |
| PTPN11 | EXON | − | chr12: 112507394-112507419 | GAAAGAGUC | 2597 | GAAAGAGTC | 3349 |
| | | | | ACGUUUCCCA | | ACGTTTCCC | |
| | | | | AGUCUG | | AAGTCTG | |
| PTPN11 | EXON | − | chr12: 112507395-112507420 | AGAAAGAGU | 2598 | AGAAAGAGT | 3350 |
| | | | | CACGUUUCCC | | CACGTTTCC | |
| | | | | AAGUCU | | CAAGTCT | |
| PTPN11 | EXON | − | chr12: 112507396-112507421 | AAGAAAGAG | 2599 | AAGAAAGAG | 3351 |
| | | | | UCACGUUUCC | | TCACGTTTCC | |
| | | | | CAAGUC | | CAAGTC | |
| PTPN11 | EXON | − | chr12: 112507428-112507453 | UCACUGUGG | 2600 | TCACTGTGG | 3352 |
| | | | | CCUGACUAA | | CCTGACTAA | |
| | | | | AACCCAG | | AACCCAG | |
| PTPN11 | EXON | − | chr12: 112507447-112507472 | CUGUUAGGG | 2601 | CTGTTAGGG | 3353 |
| | | | | CUGUUCCUUC | | CTGTTCCTTC | |
| | | | | UCACUG | | TCACTG | |
| PTPN11 | EXON | − | chr12: 112507466-112507491 | AUUCAACCU | 2602 | ATTCAACCT | 3354 |
| | | | | GGCUGGAGG | | GGCTGGAGG | |
| | | | | CCUGUUA | | CCTGTTA | |
| PTPN11 | EXON | − | chr12: 112507467-112507492 | CAUUCAACCU | 2603 | CATTCAACC | 3355 |
| | | | | GGCUGGAGG | | TGGCTGGAG | |
| | | | | CCUGUU | | GCCTGTT | |
| PTPN11 | EXON | − | chr12: 112507476-112507501 | AAAUGAGCU | 2604 | AAATGAGCT | 3356 |
| | | | | CAUUCAACCU | | CATTCAACC | |
| | | | | GGCUGG | | TGGCTGG | |
| PTPN11 | EXON | − | chr12: 112507479-112507504 | CAAAAAUGA | 2605 | CAAAAATGA | 3357 |
| | | | | GCUCAUUCA | | GCTCATTCA | |
| | | | | ACCUGGC | | ACCTGGC | |
| PTPN11 | EXON | − | chr12: 112507483-112507508 | ACAACAAAA | 2606 | ACAACAAAA | 3358 |
| | | | | AUGAGCUCA | | ATGAGCTCA | |
| | | | | UUCAACC | | TTCAACC | |
| PTPN11 | EXON | − | chr12: 112507513-112507538 | UAGAACAUU | 2607 | TAGAACATT | 3359 |
| | | | | AGCAAAUCU | | AGCAAATCT | |
| | | | | UACUGGU | | TACTGGT | |
| PTPN11 | EXON | − | chr12: 112507517-112507542 | AAUGUAGAA | 2608 | AATGTAGAA | 3360 |
| | | | | CAUUAGCAA | | CATTAGCAA | |
| | | | | AUCUUAC | | ATCTTAC | |
| PTPN11 | EXON | − | chr12: 112507550-112507575 | AGGCAAAGA | 2609 | AGGCAAAGA | 3361 |
| | | | | GGGAUGUCU | | GGGATGTCT | |
| | | | | UUGGAGA | | TTGGAGA | |
| PTPN11 | EXON | − | chr12: 112507556-112507581 | CAUAUGAGG | 2610 | CATATGAGG | 3362 |
| | | | | CAAAGAGGG | | CAAAGAGGG | |
| | | | | AUGUCUU | | ATGTCTT | |
| PTPN11 | EXON | − | chr12: 112507566-112507591 | GAUGAUUCA | 2611 | GATGATTCA | 3363 |
| | | | | ACAUAUGAG | | ACATATGAG | |
| | | | | GCAAAGA | | GCAAAGA | |
| PTPN11 | EXON | − | chr12: 112507567-112507592 | GGAUGAUUC | 2612 | GGATGATTC | 3364 |
| | | | | AACAUAUGA | | AACATATGA | |
| | | | | GGCAAAG | | GGCAAAG | |
| PTPN11 | EXON | − | chr12: 112507575-112507600 | UCCGCACUGG | 2613 | TCCGCACTG | 3365 |
| | | | | AUGAUUCAA | | GATGATTCA | |
| | | | | CAUAUG | | ACATATG | |
| PTPN11 | EXON | − | chr12: 112507593-112507618 | GAUAUUUUC | 2614 | GATATTTTC | 3366 |
| | | | | AUUGAAAUA | | ATTGAAATA | |
| | | | | UCCGCAC | | TCCGCAC | |
| PTPN11 | EXON | − | chr12: 112507664-112507689 | AGAAUCCAA | 2615 | AGAATCCAA | 3367 |
| | | | | GGAGGCCAC | | GGAGGCCAC | |
| | | | | AACUUCA | | AACTTCA | |
| PTPN11 | EXON | − | chr12: 112507678-112507703 | AAGCCAAAG | 2616 | AAGCCAAAG | 3368 |
| | | | | UCAGAAGAA | | TCAGAAGAA | |
| | | | | UCCAAGG | | TCCAAGG | |
| PTPN11 | EXON | − | chr12: 112507681-112507706 | CAGAAGCCA | 2617 | CAGAAGCCA | 3369 |
| | | | | AAGUCAGAA | | AAGTCAGAA | |
| | | | | GAAUCCA | | GAATCCA | |
| PTPN11 | EXON | − | chr12: 112507718-112507743 | AGGAACUAC | 2618 | AGGAACTAC | 3370 |
| | | | | CACCAGGGCU | | CACCAGGGC | |
| | | | | GGAUCU | | TGGATCT | |
| PTPN11 | EXON | − | chr12: 112507725-112507750 | CUCAGAAAG | 2619 | CTCAGAAAG | 3371 |
| | | | | GAACUACCAC | | GAACTACCA | |
| | | | | CAGGGC | | CCAGGGC | |
| PTPN11 | EXON | − | chr12: 112507729-112507754 | AGACCUCAG | 2620 | AGACCTCAG | 3372 |
| | | | | AAAGGAACU | | AAAGGAACT | |
| | | | | ACCACCA | | ACCACCA | |
| PTPN11 | EXON | − | chr12: 112507730-112507755 | GAGACCUCA | 2621 | GAGACCTCA | 3373 |
| | | | | GAAAGGAAC | | GAAAGGAAC | |
| | | | | UACCACC | | TACCACC | |
| PTPN11 | EXON | − | chr12: 112507743-112507768 | CUCAAGGGA | 2622 | CTCAAGGGA | 3374 |
| | | | | CUGAGAGAC | | CTGAGAGAC | |
| | | | | CUCAGAA | | CTCAGAA | |
| PTPN11 | EXON | − | chr12: 112507763-112507788 | CAGCCAAACU | 2623 | CAGCCAAAC | 3375 |
| | | | | ACCCCAAAGU | | TACCCCAAA | |
| | | | | CUCAA | | GTCTCAA | |
| PTPN11 | EXON | − | chr12: 112507764-112507789 | GCAGCCAAAC | 2624 | GCAGCCAAA | 3376 |
| | | | | UACCCCAAAG | | CTACCCCAA | |
| | | | | UCUCA | | AGTCTCA | |
| PTPN11 | EXON | − | chr12: 112507791-112507816 | CUGAUAUAC | 2625 | CTGATATAC | 3377 |
| | | | | AUUUUGUCA | | ATTTTGTCA | |
| | | | | GUGAGAA | | GTGAGAA | |
| PTPN11 | EXON | − | chr12: 112507819-112507844 | AAGGAAUAU | 2626 | AAGGAATAT | 3378 |
| | | | | UGGGGGGUG | | TGGGGGGTG | |
| | | | | GAGGUGG | | GAGGTGG | |
| PTPN11 | EXON | − | chr12: 112507820-112507845 | CAAGGAAUA | 2627 | CAAGGAATA | 3379 |
| | | | | UUGGGGGGU | | TTGGGGGGT | |
| | | | | GGAGGUG | | GGAGGTG | |
| PTPN11 | EXON | − | chr12: 112507821-112507846 | UCAAGGAAU | 2628 | TCAAGGAAT | 3380 |
| | | | | AUUGGGGGG | | ATTGGGGGG | |
| | | | | UGGAGGU | | TGGAGGT | |
| PTPN11 | EXON | − | chr12: 112507822-112507847 | UUCAAGGAA | 2629 | TTCAAGGAA | 3381 |
| | | | | UAUUGGGGG | | TATTGGGGG | |
| | | | | GUGGAGG | | GTGGAGG | |
| PTPN11 | EXON | − | chr12: 112507825-112507850 | AAGUUCAAG | 2630 | AAGTTCAAG | 3382 |
| | | | | GAAUAUUGG | | GAATATTGG | |
| | | | | GGGGUGG | | GGGGTGG | |
| PTPN11 | EXON | − | chr12: 112507828-112507853 | UCAAAGUUC | 2631 | TCAAAGTTC | 3383 |
| | | | | AAGGAAUAU | | AAGGAATAT | |
| | | | | UGGGGGG | | TGGGGGG | |
| PTPN11 | EXON | − | chr12: 112507831-112507856 | AAUUCAAAG | 2632 | AATTCAAAG | 3384 |
| | | | | UUCAAGGAA | | TTCAAGGAA | |
| | | | | UAUUGGG | | TATTGGG | |
| PTPN11 | EXON | − | chr12: 112507832-112507857 | CAAUUCAAA | 2633 | CAATTCAAA | 3385 |
| | | | | GUUCAAGGA | | GTTCAAGGA | |
| | | | | AUAUUGG | | ATATTGG | |
| PTPN11 | EXON | − | chr12: 112507833-112507858 | GCAAUUCAA | 2634 | GCAATTCAA | 3386 |
| | | | | AGUUCAAGG | | AGTTCAAGG | |
| | | | | AAUAUUG | | AATATTG | |
| PTPN11 | EXON | − | chr12: 112507834-112507859 | AGCAAUUCA | 2635 | AGCAATTCA | 3387 |
| | | | | AAGUUCAAG | | AAGTTCAAG | |
| | | | | GAAUAUU | | GAATATT | |
| PTPN11 | EXON | − | chr12: 112507835-112507860 | AAGCAAUUC | 2636 | AAGCAATTC | 3388 |
| | | | | AAAGUUCAA | | AAAGTTCAA | |
| | | | | GGAAUAU | | GGAATAT | |
| PTPN11 | EXON | − | chr12: 112507843-112507868 | GUGUUCUGA | 2637 | GTGTTCTGA | 3389 |
| | | | | AGCAAUUCA | | AGCAATTCA | |
| | | | | AAGUUCA | | AAGTTCA | |
| PTPN11 | EXON | − | chr12: 112507879-112507904 | ACUUCCCUAA | 2638 | ACTTCCCTA | 3390 |
| | | | | UAAGGGAAU | | ATAAGGGAA | |
| | | | | ACCUUC | | TACCTTC | |
| PTPN11 | EXON | − | chr12: 112507891-112507916 | GACAGCAGU | 2639 | GACAGCAGT | 3391 |
| | | | | GACACUUCCC | | GACACTTCC | |
| | | | | UAAUAA | | CTAATAA | |
| PTPN11 | EXON | − | chr12: 112507892-112507917 | AGACAGCAG | 2640 | AGACAGCAG | 3392 |
| | | | | UGACACUUCC | | TGACACTTC | |
| | | | | CUAAUA | | CCTAATA | |
| PTPN11 | EXON | − | chr12: 112507948-112507973 | AAGCUUCUU | 2641 | AAGCTTCTT | 3393 |
| | | | | GCUGCAAAU | | GCTGCAAAT | |
| | | | | ACUGAAC | | ACTGAAC | |
| PTPN11 | EXON | − | chr12: 112508018-112508043 | AAGUCAAGA | 2642 | AAGTCAAGA | 3394 |
| | | | | CAAAACCAA | | CAAAACCAA | |
| | | | | AGCAAAA | | AGCAAAA | |
| PTPN11 | EXON | − | chr12: 112508074-112508099 | UUUGUACAA | 2643 | TTTGTACAA | 3395 |
| | | | | UCAAACUCU | | TCAAACTCT | |
| | | | | UGUGUGC | | TGTGTGC | |
| PTPN11 | EXON | − | chr12: 112508127-112508152 | AUAAAAGCA | 2644 | ATAAAAGCA | 3396 |
| | | | | ACUGAUCUU | | ACTGATCTT | |
| | | | | AAGCAAC | | AAGCAAC | |
| PTPN11 | EXON | − | chr12: 112508171-112508196 | UCUUAUAAC | 2645 | TCTTATAAC | 3397 |
| | | | | AAAACUAGC | | AAAACTAGC | |
| | | | | CAAGAUC | | CAAGATC | |
| PTPN11 | EXON | − | chr12: 112508219-112508244 | CAUGAUAGU | 2646 | CATGATAGT | 3398 |
| | | | | UUGCUGACC | | TTGCTGACC | |
| | | | | UCGUGGA | | TCGTGGA | |
| PTPN11 | EXON | − | chr12: 112508220-112508245 | ACAUGAUAG | 2647 | ACATGATAG | 3399 |
| | | | | UUUGCUGAC | | TTTGCTGAC | |
| | | | | CUCGUGG | | CTCGTGG | |
| PTPN11 | EXON | − | chr12: 112508223-112508248 | AGAACAUGA | 2648 | AGAACATGA | 3400 |
| | | | | UAGUUUGCU | | TAGTTTGCT | |
| | | | | GACCUCG | | GACCTCG | |
| PTPN11 | EXON | − | chr12: 112508265-112508290 | CUAGGGACU | 2649 | CTAGGGACT | 3401 |
| | | | | AUGAUAACU | | ATGATAACT | |
| | | | | CUGGCCU | | CTGGCCT | |
| PTPN11 | EXON | − | chr12: 112508271-112508296 | AGCAACCUA | 2650 | AGCAACCTA | 3402 |
| | | | | GGGACUAUG | | GGGACTATG | |
| | | | | AUAACUC | | ATAACTC | |
| PTPN11 | EXON | − | chr12: 112508287-112508312 | GCACAUGAU | 2651 | GCACATGAT | 3403 |
| | | | | AAGCCGUAG | | AAGCCGTAG | |
| | | | | CAACCUA | | CAACCTA | |
| PTPN11 | EXON | − | chr12: 112508288-112508313 | AGCACAUGA | 2652 | AGCACATGA | 3404 |
| | | | | UAAGCCGUA | | TAAGCCGTA | |
| | | | | GCAACCU | | GCAACCT | |
| PTPN11 | EXON | − | chr12: 112508443-112508468 | CUGACUUCCU | 2653 | CTGACTTCCT | 3405 |
| | | | | CAGAAACCAC | | CAGAAACCA | |
| | | | | CUCUU | | CCTCTT | |
| PTPN11 | EXON | − | chr12: 112508475-112508500 | ACCCAUUACU | 2654 | ACCCATTAC | 3406 |
| | | | | GACUGCUCU | | TGACTGCTC | |
| | | | | GGCCCU | | TGGCCCT | |
| PTPN11 | EXON | − | chr12: 112508476-112508501 | CACCCAUUAC | 2655 | CACCCATTA | 3407 |
| | | | | UGACUGCUC | | CTGACTGCT | |
| | | | | UGGCCC | | CTGGCCC | |
| PTPN11 | EXON | − | chr12: 112508482-112508507 | CUCAUUCACC | 2656 | CTCATTCAC | 3408 |
| | | | | CAUUACUGA | | CCATTACTG | |
| | | | | CUGCUC | | ACTGCTC | |
| PTPN11 | EXON | − | chr12: 112508546-112508571 | UACCCACCAG | 2657 | TACCCACCA | 3409 |
| | | | | CAACCUAGA | | GCAACCTAG | |
| | | | | AGUAGA | | AAGTAGA | |
| PTPN11 | EXON | − | chr12: 112508592-112508617 | UAAUUUUAA | 2658 | TAATTTTAA | 3410 |
| | | | | AAUCCUCAG | | AATCCTCAG | |
| | | | | UGAGCUA | | TGAGCTA | |
| PTPN11 | EXON | − | chr12: 112508692-112508717 | AAAAAGUUA | 2659 | AAAAAGTTA | 3411 |
| | | | | UUAAGACUG | | TTAAGACTG | |
| | | | | UGAAAUU | | TGAAATT | |
| PTPN11 | EXON | − | chr12: 112508748-112508773 | CAUAAGUUU | 2660 | CATAAGTTT | 3412 |
| | | | | CAGAAGGGC | | CAGAAGGGC | |
| | | | | CACACAC | | CACACAC | |
| PTPN11 | EXON | − | chr12: 112508759-112508784 | GGAGAGAUG | 2661 | GGAGAGATG | 3413 |
| | | | | ACCAUAAGU | | ACCATAAGT | |
| | | | | UUCAGAA | | TTCAGAA | |
| PTPN11 | EXON | − | chr12: 112508760-112508785 | GGGAGAGAU | 2662 | GGGAGAGAT | 3414 |
| | | | | GACCAUAAG | | GACCATAAG | |
| | | | | UUUCAGA | | TTTCAGA | |
| PTPN11 | EXON | − | chr12: 112508785-112508810 | CAUUUGAAA | 2663 | CATTTGAAA | 3415 |
| | | | | AGACCUUGG | | AGACCTTGG | |
| | | | | UUUCAGU | | TTTCAGT | |
| PTPN11 | EXON | − | chr12: 112508786-112508811 | ACAUUUGAA | 2664 | ACATTTGAA | 3416 |
| | | | | AAGACCUUG | | AAGACCTTG | |
| | | | | GUUUCAG | | GTTTCAG | |
| PTPN11 | EXON | − | chr12: 112508795-112508820 | CAUUUAGCC | 2665 | CATTTAGCC | 3417 |
| | | | | ACAUUUGAA | | ACATTTGAA | |
| | | | | AAGACCU | | AAGACCT | |
| PTPN11 | EXON | − | chr12: 112508877-112508902 | UCCUGGCUG | 2666 | TCCTGGCTG | 3418 |
| | | | | UUUCCCCGAA | | TTTCCCCGA | |
| | | | | GCAACU | | AGCAACT | |
| PTPN11 | EXON | − | chr12: 112508899-112508924 | CUAAAAAUA | 2667 | CTAAAAATA | 3419 |
| | | | | AUCUUGACC | | ATCTTGACC | |
| | | | | AUUUUCC | | ATTTTCC | |
| PTPN11 | EXON | − | chr12: 112509036-112509061 | AUGUCUAUA | 2668 | ATGTCTATA | 3420 |
| | | | | GUCUAAGUU | | GTCTAAGTT | |
| | | | | UCCCUUA | | TCCCTTA | |
| PTPN11 | EXON | − | chr12: 112509074-112509099 | AACAUACAG | 2669 | AACATACAG | 3421 |
| | | | | AAAACAAAA | | AAAACAAAA | |
| | | | | GCUGCAC | | GCTGCAC | |
| PTPN11 | EXON | − | chr12: 112509139-112509164 | UAACAAAGG | 2670 | TAACAAAGG | 3422 |
| | | | | CAUCCUGACA | | CATCCTGAC | |
| | | | | UCAGGG | | ATCAGGG | |
| PTPN11 | EXON | − | chr12: 112509142-112509167 | UCCUAACAA | 2671 | TCCTAACAA | 3423 |
| | | | | AGGCAUCCU | | AGGCATCCT | |
| | | | | GACAUCA | | GACATCA | |
| PTPN11 | EXON | − | chr12: 112509143-112509168 | AUCCUAACA | 2672 | ATCCTAACA | 3424 |
| | | | | AAGGCAUCC | | AAGGCATCC | |
| | | | | UGACAUC | | TGACATC | |
| PTPN11 | EXON | − | chr12: 112509158-112509183 | UAAGGGCAA | 2673 | TAAGGGCAA | 3425 |
| | | | | AUACAGAUC | | ATACAGATC | |
| | | | | CUAACAA | | CTAACAA | |
| PTPN11 | EXON | − | chr12: 112509180-112509205 | GGAAAAAAG | 2674 | GGAAAAAAG | 3426 |
| | | | | AUUUCAACA | | ATTTCAACA | |
| | | | | AAAUUAA | | AAATTAA | |
| PTPN11 | EXON | − | chr12: 112509181-112509206 | AGGAAAAAA | 2675 | AGGAAAAAA | 3427 |
| | | | | GAUUUCAAC | | GATTTCAAC | |
| | | | | AAAAUUA | | AAAATTA | |
| PTPN11 | EXON | − | chr12: 112509206-112509231 | AUUUUGGAA | 2676 | ATTTTGGAA | 3428 |
| | | | | CUUUUCAAG | | CTTTTCAAG | |
| | | | | AGGAAGA | | AGGAAGA | |
| PTPN11 | EXON | − | chr12: 112509213-112509238 | AAACUAUAU | 2677 | AAACTATAT | 3429 |
| | | | | UUUGGAACU | | TTTGGAACT | |
| | | | | UUUCAAG | | TTTCAAG | |
| PTPN11 | EXON | − | chr12: 112509227-112509252 | AUGAAAGAU | 2678 | ATGAAAGAT | 3430 |
| | | | | ACAAUAAAC | | ACAATAAAC | |
| | | | | UAUAUUU | | TATATTT | |
| PTPN11 | EXON | − | chr12: 112509270-112509295 | UUGUGUGAA | 2679 | TTGTGTGAA | 3431 |
| | | | | CUGCCCAUAG | | CTGCCCATA | |
| | | | | UGAAAA | | GTGAAAA | |
| PTPN11 | EXON | − | chr12: 112509377-112509402 | UUAUUAAUU | 2680 | TTATTAATTA | 3432 |
| | | | | ACAUGAUUU | | CATGATTTG | |
| | | | | GAGGCUU | | AGGCTT | |
| PTPN11 | EXON | − | chr12: 112509383-112509408 | GGCAAAUUA | 2681 | GGCAAATTA | 3433 |
| | | | | UUAAUUACA | | TTAATTACA | |
| | | | | UGAUUUG | | TGATTTG | |
| PTPN11 | EXON | − | chr12: 112509409-112509434 | AAUCACAAU | 2682 | AATCACAAT | 3434 |
| | | | | UAGGUCAUA | | TAGGTCATA | |
| | | | | AAUAAAC | | AATAAAC | |
| PTPN11 | EXON | − | chr12: 112509424-112509449 | UUUUAUUAA | 2683 | TTTTATTAAT | 3435 |
| | | | | UAAAAGAAU | | AAAAGAATC | |
| | | | | CACAAUU | | ACAATT | |
| PTPN11 | EXON | − | chr12: 112509469-112509494 | GUAGGUCUA | 2684 | GTAGGTCTA | 3436 |
| | | | | GUCAUCAGC | | GTCATCAGC | |
| | | | | UUAAUCA | | TTAATCA | |
| PTPN11 | EXON | − | chr12: 112509470-112509495 | UGUAGGUCU | 2685 | TGTAGGTCT | 3437 |
| | | | | AGUCAUCAG | | AGTCATCAG | |
| | | | | CUUAAUC | | CTTAATC | |
| PTPN11 | EXON | − | chr12: 112509492-112509517 | CAUAUACUG | 2686 | CATATACTG | 3438 |
| | | | | CAGGAAAAU | | CAGGAAAAT | |
| | | | | UAAUUGU | | TAATTGT | |
| PTPN11 | EXON | − | chr12: 112509507-112509532 | UCUGGUACA | 2687 | TCTGGTACA | 3439 |
| | | | | AUACUUCAU | | ATACTTCAT | |
| | | | | AUACUGC | | ATACTGC | |
| PTPN11 | EXON | − | chr12: 112509530-112509555 | AAAUAUUAC | 2688 | AAATATTAC | 3440 |
| | | | | AUAUCUUUU | | ATATCTTTTA | |
| | | | | AAUACUC | | ATACTC | |
| PTPN11 | EXON | − | chr12: 112509573-112509598 | ACAUCCUAA | 2689 | ACATCCTAA | 3441 |
| | | | | AACGUAUUC | | AACGTATTC | |
| | | | | CUUUUAA | | CTTTTAA | |
| PTPN11 | EXON | − | chr12: 112509683-112509708 | GACUACAUA | 2690 | GACTACATA | 3442 |
| | | | | AUAUACGUG | | ATATACGTG | |
| | | | | GGCAAAA | | GGCAAAA | |
| PTPN11 | EXON | − | chr12: 112509691-112509716 | UGCAAAUAG | 2691 | TGCAAATAG | 3443 |
| | | | | ACUACAUAA | | ACTACATAA | |
| | | | | UAUACGU | | TATACGT | |
| PTPN11 | EXON | − | chr12: 112509692-112509717 | UUGCAAAUA | 2692 | TTGCAAATA | 3444 |
| | | | | GACUACAUA | | GACTACATA | |
| | | | | AUAUACG | | ATATACG | |
| PTPN11 | EXON | − | chr12: 112509788-112509813 | GCGCUAACAC | 2693 | GCGCTAACA | 3445 |
| | | | | CCAUAAAUA | | CCCATAAAT | |
| | | | | UAGGUG | | ATAGGTG | |
| PTPN11 | EXON | − | chr12: 112509789-112509814 | UGCGCUAAC | 2694 | TGCGCTAAC | 3446 |
| | | | | ACCCAUAAA | | ACCCATAAA | |
| | | | | UAUAGGU | | TATAGGT | |
| PTPN11 | EXON | − | chr12: 112509790-112509815 | UUGCGCUAA | 2695 | TTGCGCTAA | 3447 |
| | | | | CACCCAUAAA | | CACCCATAA | |
| | | | | UAUAGG | | ATATAGG | |
| PTPN11 | EXON | − | chr12: 112509793-112509818 | CAGUUGCGC | 2696 | CAGTTGCGC | 3448 |
| | | | | UAACACCCAU | | TAACACCCA | |
| | | | | AAAUAU | | TAAATAT | |
| PTPN11 | EXON | − | chr12: 112509900-112509925 | CGACAAAUG | 2697 | CGACAAATG | 3449 |
| | | | | CCAUCAUAU | | CCATCATAT | |
| | | | | AAGAAAA | | AAGAAAA | |

[0342] gRNA molecule scaffolds or use in connection with particular Cas molecules are known in the art. Exemplary gRNA molecules, particularly useful in combination with an S. pyogenes Cas9 molecule, include, e.g., dgRNA molecule comprising, e.g., consisting of, a first nucleic acid sequence having the sequence of:

(SEQ ID NO: 47)
nnnnnnnnnnnnnnnnnnnnGUUUUAGAGCUAUGCUGUUUUG,

where the “n”s refer to the residues of the targeting domain, e.g., as described herein, and may consist of 15-25 nucleotides, e.g., consists of 20 nucleotides; and a second nucleic acid sequence having the exemplary sequence of:

(SEQ ID NO: 48)
AACUUACCAAGGAACAGCAUAGCAAGUUAAAAUAAGGCUAGUCCGUUAUC
AACUUGAAAAAGUGGCACCGAGUCGGUGC,
optionally with 1, 2, 3, 4, 5, 6, or 7 (e.g., 4 or
7, e.g., 7) additional U nucleotides at the 3′
end.

[0343] The second nucleic acid molecule may alternatively consist of a fragment of the sequence above, wherein such fragment is capable of hybridizing to the first nucleic acid. An example of such second nucleic acid molecule is:

(SEQ ID NO: 49)
AACAGCAUAGCAAGUUAAAAUAAGGCUAGUCCGUUAUCAACUUGAAAAAG
UGGCACCGAGUCGGUGC,
optionally with 1, 2, 3, 4, 5, 6, or 7 (e.g., 4 or
7, e.g., 7) additional U nucleotides at the 3′
end.

[0344] Another exemplary gRNA molecule, e.g., a sgRNA molecule, particularly for use with an S. pyogenes Cas9 molecule, comprises, e.g., consists of a first nucleic acid having the sequence:

(SEQ ID NO: 50)
nnnnnnnnnnnnnnnnnnnGUUUUAGAGCUAGAAAUAGCAAGUUAAAAUA
AGGCUAGUCCGUUAUCAACUUGAAAAAGUGGCACCGAGUCGGUGC,

where the “n”s refer to the residues of the targeting domain, e.g., as described herein, and may consist of 15-25 nucleotides, e.g., consist of 20 nucleotides, optionally with 1, 2, 3, 4, 5, 6, or 7 (e.g., 4 or 7, e.g., 4) additional U nucleotides at the 3′ end.

### TALEN Gene Editing Systems

[0345] TALENs are produced artificially by fusing a TAL effector DNA binding domain to a DNA cleavage domain. Transcription activator-like effects (TALEs) can be engineered to bind any desired DNA sequence, including a portion of the HLA or TCR gene. By combining an engineered TALE with a DNA cleavage domain, a restriction enzyme can be produced which is specific to any desired DNA sequence, including a HLA or TCR sequence. These can then be introduced into a cell, wherein they can be used for genome editing. Boch (2011) Nature Biotech. 29: 135-6; and Boch et al. (2009) Science 326: 1509-12; Moscou et al. (2009) Science 326: 3501.

[0346] TALEs are proteins secreted by Xanthomonas bacteria. The DNA binding domain contains a repeated, highly conserved 33-34 amino acid sequence, with the exception of the 12th and 13th amino acids. These two positions are highly variable, showing a strong correlation with specific nucleotide recognition. They can thus be engineered to bind to a desired DNA sequence.

[0347] To produce a TALEN, a TALE protein is fused to a nuclease (N), which is, for example, a wild-type or mutated FokI endonuclease. Several mutations to FokI have been made for its use in TALENs; these, for example, improve cleavage specificity or activity. Cermak et al. (2011) Nucl. Acids Res. 39: e82; Miller et al. (2011) Nature Biotech. 29: 143-8; Hockemeyer et al. (2011) Nature Biotech. 29: 731-734; Wood et al. (2011) Science 333: 307; Doyon et al. (2010) Nature Methods 8: 74-79; Szczepek et al. (2007) Nature Biotech. 25: 786-793; and Guo et al. (2010) J. Mol. Biol. 200: 96.

[0348] The FokI domain functions as a dimer, requiring two constructs with unique DNA binding domains for sites in the target genome with proper orientation and spacing. Both the number of amino acid residues between the TALE DNA binding domain and the FokI cleavage domain and the number of bases between the two individual TALEN binding sites appear to be important parameters for achieving high levels of activity. Miller et al. (2011) Nature Biotech. 29: 143-8.

[0349] A TALEN specific for a gene encoding SHP1 or SHP2, can be used inside a cell to produce a double-stranded break (DSB). A mutation can be introduced at the break site if the repair mechanisms improperly repair the break via non-homologous end joining. For example, improper repair may introduce a frame shift mutation.

[0350] TALENs specific to sequences in a gene encoding SHP1 or SHP2 can be constructed using any method known in the art, including various schemes using modular components. Zhang et al. (2011) Nature Biotech. 29: 149-53; Geibler et al. (2011) PLoS ONE 6: e19509; U.S. Pat. Nos. 8,420,782; 8,470,973, the contents of which are hereby incorporated by reference in their entirety.

### Zinc Finger Nucleases

[0351] “ZFN” or “Zinc Finger Nuclease” refers to a zinc finger nuclease, an artificial nuclease which can be used to modify, e.g., delete one or more nucleic acids of, a desired nucleic acid sequence, e.g., a gene encoding SHP1 or SHP2.

[0352] Like a TALEN, a ZFN comprises a FokI nuclease domain (or derivative thereof) fused to a DNA-binding domain. In the case of a ZFN, the DNA-binding domain comprises one or more zinc fingers. Carroll et al. (2011) Genetics Society of America 188: 773-782; and Kim et al. (1996) Proc. Natl. Acad. Sci. USA 93: 1156-1160.

[0353] A zinc finger is a small protein structural motif stabilized by one or more zinc ions. A zinc finger can comprise, for example, Cys2His2, and can recognize an approximately 3-bp sequence. Various zinc fingers of known specificity can be combined to produce multi-finger polypeptides which recognize about 6, 9, 12, 15 or 18-bp sequences. Various selection and modular assembly techniques are available to generate zinc fingers (and combinations thereof) recognizing specific sequences, including phage display, yeast one-hybrid systems, bacterial one-hybrid and two-hybrid systems, and mammalian cells.

[0354] Like a TALEN, a ZFN must dimerize to cleave DNA. Thus, a pair of ZFNs are required to target non-palindromic DNA sites. The two individual ZFNs must bind opposite strands of the DNA with their nucleases properly spaced apart. Bitinaite et al. (1998) Proc. Natl. Acad. Sci. USA 95: 10570-5.

[0355] Also like a TALEN, a ZFN can create a double-stranded break in the DNA, which can create a frame-shift mutation if improperly repaired, leading to a decrease in the expression of a gene encoding SHP1 or SHP2, in a cell. ZFNs can also be used with homologous recombination to mutate a gene encoding SHP1 or SHP2.

[0356] ZFNs specific to sequences in a gene encoding SHP1 or SHP2 can be constructed using any method known in the art. See, e.g., Provasi (2011) Nature Med. 18: 807-815; Torikai (2013) Blood 122: 1341-1349; Cathomen et al. (2008) Mol. Ther. 16: 1200-7; and Guo et al. (2010) J. Mol. Biol. 400: 96; U.S. Patent Publication 2011/0158957; and U.S. Patent Publication 2012/0060230, the contents of which are hereby incorporated by reference in their entirety. In embodiments, The ZFN gene editing system may also comprise nucleic acid encoding one or more components of the ZFN gene editing system, e.g., a ZFN gene editing system targeted to a gene encoding SHP1 or SHP2.

Double-Stranded RNA, e.g., siRNA or shRNA, Targeting SHP1 or SHP2

[0357] According to the present invention, double stranded RNA (“dsRNA”), e.g., siRNA or shRNA can be used to decrease the expression of SHP1 or SHP2. Also contemplated by the present invention are the uses of a nucleic acid encoding said dsRNA inhibitors of a gene encoding SHP1 or SHP2.

[0358] In an embodiment, the SHP inhibitor is a nucleic acid, e.g., a dsRNA, e.g., a siRNA or shRNA specific for a nucleic acid encoding SHP1 or SHP2.

[0359] An aspect of the invention provides a composition comprising a dsRNA, e.g., a siRNA or shRNA, comprising at least 15 contiguous nucleotides, e.g., 15, 16, 17, 18, 19, 20, 21, 22, 23, 24 or 25 contiguous nucleotides, e.g., 21 contiguous nucleotides. It is understood that some of the target sequences and/or shRNA molecules are presented as DNA, but the dsRNA agents targeting these sequences or comprising these sequences can be RNA, or any nucleotide, modified nucleotide or substitute disclosed herein and/or known in the art, provided that the molecule can still mediate RNA interference.

[0360] In embodiments, the SHP inhibitor is a nucleic acid, e.g., DNA, encoding a dsRNA inhibitor, e.g., shRNA or siRNA, of any of the above embodiments. In embodiments, the nucleic acid, e.g., DNA, is disposed on a vector, e.g., any conventional expression system, e.g., as described herein, e.g., a lentiviral vector.

### CAR Molecules

[0361] In one aspect, the antigen binding domain of a CAR described herein is a scFv antibody fragment. In one aspect, such antibody fragments are functional in that they retain the equivalent binding affinity, e.g., they bind the same antigen with comparable affinity, as the IgG antibody from which it is derived. In other embodiments, the antibody fragment has a lower binding affinity, e.g., it binds the same antigen with a lower binding affinity than the antibody from which it is derived, but is functional in that it provides a biological response described herein. In one embodiment, the CAR molecule comprises an antibody fragment that has a binding affinity KD of 10⁻⁴ M to 10⁻⁸ M, e.g., 10⁻⁵ M to 10⁻⁷ M, e.g., 10⁻⁶ M or 10⁻⁷ M, for the target antigen. In one embodiment, the antibody fragment has a binding affinity that is at least five-fold, 10-fold, 20-fold, 30-fold, 50-fold, 100-fold or 1,000-fold less than a reference antibody, e.g., an antibody described herein.

[0362] In one aspect such antibody fragments are functional in that they provide a biological response that can include, but is not limited to, activation of an immune response, inhibition of signal-transduction origination from its target antigen, inhibition of kinase activity, and the like, as will be understood by a skilled artisan.

[0363] In one aspect, the antigen binding domain of the CAR is a scFv antibody fragment that is humanized compared to the murine sequence of the scFv from which it is derived.

[0364] In one aspect, the antigen binding domain of a CAR of the invention (e.g., a scFv) is encoded by a nucleic acid molecule whose sequence has been codon optimized for expression in a mammalian cell. In one aspect, entire CAR construct of the invention is encoded by a nucleic acid molecule whose entire sequence has been codon optimized for expression in a mammalian cell. Codon optimization refers to the discovery that the frequency of occurrence of synonymous codons (i.e., codons that code for the same amino acid) in coding DNA is biased in different species. Such codon degeneracy allows an identical polypeptide to be encoded by a variety of nucleotide sequences. A variety of codon optimization methods is known in the art, and include, e.g., methods disclosed in at least U.S. Pat. Nos. 5,786,464 and 6,114,148.

[0365] In one aspect, the CARs of the invention combine an antigen binding domain of a specific antibody with an intracellular signaling molecule. For example, in some aspects, the intracellular signaling molecule includes, but is not limited to, CD3-zeta chain, 4-1BB and CD28 signaling modules, a functional variant thereof, and combinations thereof. In one aspect, the antigen binding domain binds to a tumor antigen as described herein.

[0366] Furthermore, the present invention provides CARs and CAR-expressing cells and their use in medicaments or methods for treating, among other diseases, cancer or any malignancy or autoimmune diseases involving cells or tissues which express a tumor antigen as described herein.

[0367] In one aspect, the CAR of the invention can be used to eradicate a normal cell that express a tumor antigen as described herein, thereby applicable for use as a cellular conditioning therapy prior to cell transplantation. In one aspect, the normal cell that expresses a tumor antigen as described herein is a normal stem cell and the cell transplantation is a stem cell transplantation.

[0368] In one aspect, the invention provides an immune effector cell (e.g., T cell, NK cell) engineered to express a chimeric antigen receptor (CAR), wherein the engineered immune effector cell exhibits an antitumor property. A preferred antigen is a cancer associated antigen (i.e., tumor antigen) described herein. In one aspect, the antigen binding domain of the CAR comprises a partially humanized antibody fragment. In one aspect, the antigen binding domain of the CAR comprises a partially humanized scFv. Accordingly, the invention provides CARs that comprises a humanized antigen binding domain and is engineered into a cell, e.g., a T cell or a NK cell, and methods of their use for adoptive therapy.

[0369] In one aspect, the CARs of the invention comprise at least one intracellular domain selected from the group of a CD137 (4-1BB) signaling domain, a CD28 signaling domain, a CD27 signal domain, a CD3zeta signal domain, a functional variant thereof, and any combination thereof. In one aspect, the CARs of the invention comprise at least one intracellular signaling domain is from one or more costimulatory molecule(s) other than a CD137 (4-1BB) or CD28.

[0370] Sequences of some examples of various components of CARs of the instant invention is listed in Table 1, where aa stands for amino acids, and na stands for nucleic acids that encode the corresponding peptide.

TABLE 1
Sequences of various components of CAR (aa - amino acids, na - nucleic acids
that encodes the corresponding protein)

| SEQ | | |
|---|---|---|
| ID | | |
| NO | description | Sequence |
| 400 | EF-1 | CGTGAGGCTCCGGTGCCCGTCAGTGGGCAGAGCGCACATCGCCC |
| | promoter | ACAGTCCCCGAGAAGTTGGGGGGAGGGGTCGGCAATTGAACCGG |
| | | TGCCTAGAGAAGGTGGCGCGGGGTAAACTGGGAAAGTGATGTCG |
| | | TGTACTGGCTCCGCCTTTTTCCCGAGGGTGGGGGAGAACCGTATA |
| | | TAAGTGCAGTAGTCGCCGTGAACGTTCTTTTTCGCAACGGGTTTG |
| | | CCGCCAGAACACAGGTAAGTGCCGTGTGTGGTTCCCGCGGGCCTG |
| | | GCCTCTTTACGGGTTATGGCCCTTGCGTGCCTTGAATTACTTCCAC |
| | | CTGGCTGCAGTACGTGATTCTTGATCCCGAGCTTCGGGTTGGAAG |
| | | TGGGTGGGAGAGTTCGAGGCCTTGCGCTTAAGGAGCCCCTTCGCC |
| | | TCGTGCTTGAGTTGAGGCCTGGCCTGGGCGCTGGGGCCGCCGCGT |
| | | GCGAATCTGGTGGCACCTTCGCGCCTGTCTCGCTGCTTTCGATAA |
| | | GTCTCTAGCCATTTAAAATTTTTGATGACCTGCTGCGACGCTTTTT |
| | | TTCTGGCAAGATAGTCTTGTAAATGCGGGCCAAGATCTGCACACT |
| | | GGTATTTCGGTTTTTGGGGCCGCGGGCGGCGACGGGGCCCGTGCG |
| | | TCCCAGCGCACATGTTCGGCGAGGCGGGGCCTGCGAGCGCGGCC |
| | | ACCGAGAATCGGACGGGGGTAGTCTCAAGCTGGCCGGCCTGCTCT |
| | | GGTGCCTGGCCTCGCGCCGCCGTGTATCGCCCCGCCCTGGGCGGC |
| | | AAGGCTGGCCCGGTCGGCACCAGTTGCGTGAGCGGAAAGATGGC |
| | | CGCTTCCCGGCCCTGCTGCAGGGAGCTCAAAATGGAGGACGCGG |
| | | CGCTCGGGAGAGCGGGCGGGTGAGTCACCCACACAAAGGAAAAG |
| | | GGCCTTTCCGTCCTCAGCCGTCGCTTCATGTGACTCCACGGAGTA |
| | | CCGGGCGCCGTCCAGGCACCTCGATTAGTTCTCGAGCTTTTGGAG |
| | | TACGTCGTCTTTAGGTTGGGGGGAGGGGTTTTATGCGATGGAGTT |
| | | TCCCCACACTGAGTGGGTGGAGACTGAAGTTAGGCCAGCTTGGCA |
| | | CTTGATGTAATTCTCCTTGGAATTTGCCCTTTTTGAGTTTGGATCT |
| | | TGGTTCATTCTCAAGCCTCAGACAGTGGTTCAAAGTTTTTTTCTTC |
| | | CATTTCAGGTGTCGTGA |
| 401 | Leader (aa) | MALPVTALLLPLALLLHAARP |
| 402 | Leader (na) | ATGGCCCTGCCTGTGACAGCCCTGCTGCTGCCTCTGGCTCTGCTGC |
| | | TGCATGCCGCTAGACCC |
| 403 | CD 8 hinge | TTTPAPRPPTPAPTIASQPLSLRPEACRPAAGGAVHTRGLDFACD |
| | (aa) | |
| 404 | CD8 hinge | ACCACGACGCCAGCGCCGCGACCACCAACACCGGCGCCCACCAT |
| | (na) | CGCGTCGCAGCCCCTGTCCCTGCGCCCAGAGGCGTGCCGGCCAGC |
| | | GGCGGGGGGCGCAGTGCACACGAGGGGGCTGGACTTCGCCTGTG |
| | | AT |
| 405 | Ig4 hinge (aa) | ESKYGPPCPPCPAPEFLGGPSVFLFPPKPKDTLMISRTPEVTCVVVDV |
| | | SQEDPEVQFNWYVDGVEVHNAKTKPREEQFNSTYRVVSVLTVLHQ |
| | | DWLNGKEYKCKVSNKGLPSSIEKTISKAKGQPREPQVYTLPPSQEEM |
| | | TKNQVSLTCLVKGFYPSDIAVEWESNGQPENNYKTTPPVLDSDGSFF |
| | | LYSRLTVDKSRWQEGNVFSCSVMHEALHNHYTQKSLSLSLGKM |
| 406 | Ig4 hinge | GAGAGCAAGTACGGCCCTCCCTGCCCCCCTTGCCCTGCCCCCGAG |
| | (na) | TTCCTGGGCGGACCCAGCGTGTTCCTGTTCCCCCCCAAGCCCAAG |
| | | GACACCCTGATGATCAGCCGGACCCCCGAGGTGACCTGTGTGGTG |
| | | GTGGACGTGTCCCAGGAGGACCCCGAGGTCCAGTTCAACTGGTAC |
| | | GTGGACGGCGTGGAGGTGCACAACGCCAAGACCAAGCCCCGGGA |
| | | GGAGCAGTTCAATAGCACCTACCGGGTGGTGTCCGTGCTGACCGT |
| | | GCTGCACCAGGACTGGCTGAACGGCAAGGAATACAAGTGTAAGG |
| | | TGTCCAACAAGGGCCTGCCCAGCAGCATCGAGAAAACCATCAGC |
| | | AAGGCCAAGGGCCAGCCTCGGGAGCCCCAGGTGTACACCCTGCC |
| | | CCCTAGCCAAGAGGAGATGACCAAGAACCAGGTGTCCCTGACCT |
| | | GCCTGGTGAAGGGCTTCTACCCCAGCGACATCGCCGTGGAGTGGG |
| | | AGAGCAACGGCCAGCCCGAGAACAACTACAAGACCACCCCCCCT |
| | | GTGCTGGACAGCGACGGCAGCTTCTTCCTGTACAGCCGGCTGACC |
| | | GTGGACAAGAGCCGGTGGCAGGAGGGCAACGTCTTTAGCTGCTC |
| | | CGTGATGCACGAGGCCCTGCACAACCACTACACCCAGAAGAGCC |
| | | TGAGCCTGTCCCTGGGCAAGATG |
| 407 | IgD hinge | RWPESPKAQASSVPTAQPQAEGSLAKATTAPATTRNTGRGGEEKKK |
| | (aa) | EKEKEEQEERETKTPECPSHTQPLGVYLLTPAVQDLWLRDKATFTCF |
| | | VVGSDLKDAHLTWEVAGKVPTGGVEEGLLERHSNGSQSQHSRLTLP |
| | | RSLWNAGTSVTCTLNHPSLPPQRLMALREPAAQAPVKLSLNLLASSD |
| | | PPEAASWLLCEVSGFSPPNILLMWLEDQREVNTSGFAPARPPPQPGST |
| | | TFWAWSVLRVPAPPSPQPATYTCVVSHEDSRTLLNASRSLEVSYVTD |
| | | H |
| 408 | IgD hinge | AGGTGGCCCGAAAGTCCCAAGGCCCAGGCATCTAGTGTTCCTACT |
| | (na) | GCACAGCCCCAGGCAGAAGGCAGCCTAGCCAAAGCTACTACTGC |
| | | ACCTGCCACTACGCGCAATACTGGCCGTGGCGGGGAGGAGAAGA |
| | | AAAAGGAGAAAGAGAAAGAAGAACAGGAAGAGAGGGAGACCAA |
| | | GACCCCTGAATGTCCATCCCATACCCAGCCGCTGGGCGTCTATCT |
| | | CTTGACTCCCGCAGTACAGGACTTGTGGCTTAGAGATAAGGCCAC |
| | | CTTTACATGTTTCGTCGTGGGCTCTGACCTGAAGGATGCCCATTTG |
| | | ACTTGGGAGGTTGCCGGAAAGGTACCCACAGGGGGGGTTGAGGA |
| | | AGGGTTGCTGGAGCGCCATTCCAATGGCTCTCAGAGCCAGCACTC |
| | | AAGACTCACCCTTCCGAGATCCCTGTGGAACGCCGGGACCTCTGT |
| | | CACATGTACTCTAAATCATCCTAGCCTGCCCCCACAGCGTCTGAT |
| | | GGCCCTTAGAGAGCCAGCCGCCCAGGCACCAGTTAAGCTTAGCCT |
| | | GAATCTGCTCGCCAGTAGTGATCCCCCAGAGGCCGCCAGCTGGCT |
| | | CTTATGCGAAGTGTCCGGCTTTAGCCCGCCCAACATCTTGCTCAT |
| | | GTGGCTGGAGGACCAGCGAGAAGTGAACACCAGCGGCTTCGCTC |
| | | CAGCCCGGCCCCCACCCCAGCCGGGTTCTACCACATTCTGGGCCT |
| | | GGAGTGTCTTAAGGGTCCCAGCACCACCTAGCCCCCAGCCAGCCA |
| | | CATACACCTGTGTTGTGTCCCATGAAGATAGCAGGACCCTGCTAA |
| | | ATGCTTCTAGGAGTCTGGAGGTTTCCTACGTGACTGACCATT |
| 10 | GS | GGGGSGGGGS |
| | hinge/linker | |
| | (aa) | |
| 11 | GS | GGTGGCGGAGGTTCTGGAGGTGGAGGTTCC |
| | hinge/linker | |
| | (na) | |
| 12 | CD8TM (aa) | IYIWAPLAGTCGVLLLSLVITLYC |
| 13 | CD8 TM (na) | ATCTACATCTGGGCGCCCTTGGCCGGGACTTGTGGGGTCCTTCTC |
| | | CTGTCACTGGTTATCACCCTTTACTGC |
| 14 | 4-1BB | KRGRKKLLYIFKQPFMRPVQTTQEEDGCSCRFPEEEEGGCEL |
| | intracellular | |
| | domain (aa) | |
| 15 | 4-1BB | AAACGGGGCAGAAAGAAACTCCTGTATATATTCAAACAACCATTT |
| | intracellular | ATGAGACCAGTACAAACTACTCAAGAGGAAGATGGCTGTAGCTG |
| | domain (na) | CCGATTTCCAGAAGAAGAAGAAGGAGGATGTGAACTG |
| 16 | CD27 (aa) | QRRKYRSNKGESPVEPAEPCRYSCPREEEGSTIPIQEDYRKPEPACSP |
| 17 | CD27 (na) | AGGAGTAAGAGGAGCAGGCTCCTGCACAGTGACTACATGAACAT |
| | | GACTCCCCGCCGCCCCGGGCCCACCCGCAAGCATTACCAGCCCTA |
| | | TGCCCCACCACGCGACTTCGCAGCCTATCGCTCC |
| 18 | CD3-zeta | RVKFSRSADAPAYKQGQNQLYNELNLGRREEYDVLDKRRGRDPEM |
| | (aa) | GGKPRRKNPQEGLYNELQKDKMAEAYSEIGMKGERRRGKGHDGLY |
| | | QGLSTATKDTYDALHMQALPPR |
| 19 | CD3-zeta | AGAGTGAAGTTCAGCAGGAGCGCAGACGCCCCCGCGTACAAGCA |
| | (na) | GGGCCAGAACCAGCTCTATAACGAGCTCAATCTAGGACGAAGAG |
| | | AGGAGTACGATGTTTTGGACAAGAGACGTGGCCGGGACCCTGAG |
| | | ATGGGGGGAAAGCCGAGAAGGAAGAACCCTCAGGAAGGCCTGTA |
| | | CAATGAACTGCAGAAAGATAAGATGGCGGAGGCCTACAGTGAGA |
| | | TTGGGATGAAAGGCGAGCGCCGGAGGGGCAAGGGGCACGATGGC |
| | | CTTTACCAGGGTCTCAGTACAGCCACCAAGGACACCTACGACGCC |
| | | CTTCACATGCAGGCCCTGCCCCCTCGC |
| 20 | CD3-zeta | RVKFSRSADAPAYQQGQNQLYNELNLGRREEYDVLDKRRGRDPEM |
| | (aa) | GGKPRRKNPQEGLYNELQKDKMAEAYSEIGMKGERRRGKGHDGLY |
| | | QGLSTATKDTYDALHMQALPPR |
| 21 | CD3-zeta | AGAGTGAAGTTCAGCAGGAGCGCAGACGCCCCCGCGTACCAGCA |
| | (na) | GGGCCAG |
| | | AACCAGCTCTATAACGAGCTCAATCTAGGACGAAGAGAGGAGTA |
| | | CGATGTTT |
| | | TGGACAAGAGACGTGGCCGGGACCCTGAGATGGGGGGAAAGCCG |
| | | AGAAGGA |
| | | AGAACCCTCAGGAAGGCCTGTACAATGAACTGCAGAAAGATAAG |
| | | ATGGCGG |
| | | AGGCCTACAGTGAGATTGGGATGAAAGGCGAGCGCCGGAGGGGC |
| | | AAGGGGC |
| | | ACGATGGCCTTTACCAGGGTCTCAGTACAGCCACCAAGGACACCT |
| | | ACGACGC |
| | | CCTTCACATGCAGGCCCTGCCCCCTCGC |
| 22 | linker | GGGGS |
| 23 | linker | GGTGGCGGAGGTTCTGGAGGTGGAGGTTCC |
| 24 | PD-1 | Pgwfldspdrpwnpptfspallvvtegdnatftcsfsntsesfvlnwyrmspsnqtdklaafpedrsqpg |
| | extracellular | qdcrfrvtqlpngrdfhmsvvrarrndsgtylcgaislapkaqikeslraelrvterraevptahpspsprpa |
| | domain (aa) | gqfqtlv |
| 25 | PD-1 | Cccggatggtttctggactctccggatcgcccgtggaatcccccaaccttctcaccggcactcttggttgtgac |
| | extracellular | tgagggcgataatgcgaccttcacgtgctcgttctccaacacctccgaatcattcgtgctgaactggtaccgca |
| | domain (na) | tgagcccgtcaaaccagaccgacaagctcgccgcgtttccggaagatcggtcgcaaccgggacaggattgt |
| | | cggttccgcgtgactcaactgccgaatggcagagacttccacatgagcgtggtccgcgctaggcgaaacga |
| | | ctccgggacctacctgtgcggagccatctcgctggcgcctaaggcccaaatcaaagagagcttgagggccg |
| | | aactgagagtgaccgagcgcagagctgaggtgccaactgcacatccatccccatcgcctcggcctgcggg |
| | | gcagtttcagaccctggtc |
| 26 | PD-1 CAR | Malpvtalllplalllhaarppgwfldspdrpwnpptfspallvvtegdnatftcsfsntsesfvlnwyrms |
| | (aa) with | psnqtdklaafpedrsqpgqdcrfrvtqlpngrdfhmsvvrarrndsgtylcgaislapkaqikeslraelr |
| | signal | vterraevptahpspsprpagqfqtlvtttpaprpptpaptiasqplslrpeacrpaaggavhtrgldfacdiy |
| | | iwaplagtcgvlllslvitlyckrgrkkllyifkqpfmrpvqttqeedgescrfpeeeeggcelrvkfsrsad |
| | | apaykqgqnqlynelnlgrreeydvldkrrgrdpemggkprrknpqeglynelqkdkmaeayseigm |
| | | kgerrrgkghdglyqglstatkdtydalhmqalppr |
| 27 | PD-1 CAR | Atggccctccctgtcactgccctgcttctccccctcgcactcctgctccacgccgctagaccacccggatggt |
| | (na) | ttctggactctccggatcgcccgtggaatcccccaaccttctcaccggcactcttggttgtgactgagggcgat |
| | | aatgcgaccttcacgtgctcgttctccaacacctccgaatcattcgtgctgaactggtaccgcatgagcccgtc |
| | | aaaccagaccgacaagctcgccgcgtttccggaagatcggtcgcaaccgggacaggattgtcggttccgcg |
| | | tgactcaactgccgaatggcagagacttccacatgagcgtggtccgcgctaggcgaaacgactccgggacc |
| | | tacctgtgcggagccatctcgctggcgcctaaggcccaaatcaaagagagcttgagggccgaactgagagt |
| | | gaccgagcgcagagctgaggtgccaactgcacatccatccccatcgcctcggcctgcggggcagtttcaga |
| | | ccctggtcacgaccactccggcgccgcgcccaccgactccggccccaactatcgcgagccagcccctgtc |
| | | gctgaggccggaagcatgccgccctgccgccggaggtgctgtgcatacccggggattggacttcgcatgc |
| | | gacatctacatttgggctcctctcgccggaacttgtggcgtgctccttctgtccctggtcatcaccctgtactgca |
| | | agcggggtcggaaaaagcttctgtacattttcaagcagcccttcatgaggcccgtgcaaaccacccaggagg |
| | | aggacggttgctcctgccggttccccgaagaggaagaaggaggttgcgagctgcgcgtgaagttctcccgg |
| | | agcgccgacgcccccgcctataagcagggccagaaccagctgtacaacgaactgaacctgggacggcgg |
| | | gaagagtacgatgtgctggacaagcggcgcggccgggaccccgaaatgggcgggaagcctagaagaaa |
| | | gaaccctcaggaaggcctgtataacgagctgcagaaggacaagatggccgaggcctactccgaaattggg |
| | | atgaagggagagcggcggaggggaaaggggcacgacggcctgtaccaaggactgtccaccgccaccaa |
| | | ggacacatacgatgccctgcacatgcaggcccttccccctcgc |
| 28 | linker | (Gly-Gly-Gly-Ser)ₙ, where ₙ = 1-10 |
| 29 | linker | (Gly4 Ser)4 |
| 30 | linker | (Gly4 Ser)3 |
| 31 | linker | (Gly3Ser) |
| 32 | poly A | (aaaaaaaaaa)ₙ, where ₙ = 200 |
| 33 | poly A | (aaaaaaaaaa)ₙ, where ₙ = 15 |
| 34 | poly A | (aaaaaaaaaa)ₙ, where ₙ = 500 |
| 35 | poly A | (tttttttttt)ₙ, where ₙ = 10 |
| 36 | poly A | (tttttttttt)ₙ, where ₙ = 500 |
| 37 | poly A | (aaaaaaaaaa)ₙ, where ₙ = 500 |
| 38 | poly A | (aaaaaaaaaa)ₙ, where ₙ = 40 |
| 39 | PD1 CAR | Pgwfldspdrpwnpptfspallvvtegdnatftcsfsntsesfvlnwyrmspsnqtdklaafpedrsqpg |
| | (aa) | qdcrfrvtqlpngrdfhmsvvrarrndsgtylcgaislapkaqikeslraelrvterraevptahpspsprpa |
| | | gqfqtlvtttpaprpptpaptiasqplslrpeacrpaaggavhtrgldfacdiyiwaplagtcgvlllslvitly |
| | | ckrgrkkllyifkqpfmrpvqttqeedgcscrfpeeeeggcelrvkfsrsadapaykqgqnqlynelnlgr |
| | | reeydvldkrrgrdpemggkprrknpqeglynelqkdkmaeayseigmkgerrrgkghdglyqglst |
| | | atkdtydalhmqalppr |
| 427 | CD28 | RSKRSRLLHSDX₁MX₂MTPRRPGPTRKHYQPYAPPRDFAAYRS |
| | costimulatory | (wherein X₁ and X₂ can be any amino acid) |
| | domain (aa) | |
| 428 | CD28 | RSKRSRLLHSDYMFMTPRRPGPTRKHYQPYAPPRDFAAYRS |
| | costimulatory | |
| | domain (aa) | |
| 429 | CD28 | RSKRSRLLHSDFMNMTPRRPGPTRKHYQPYAPPRDFAAYRS |
| | costimulatory | |
| | domain (aa) | |
| 430 | CD28 | RSKRSRLLHSDFMFMTPRRPGPTRKHYQPYAPPRDFAAYRS |
| | costimulatory | |
| | domain (aa) | |
| 5 | CD28 | RSKRSRLLHSDYMNMTPRRPGPTRKHYQPYAPPRDFAAYRS |
| | costimulatory | |
| | domain (aa) | |
| 6 | CD28 | aggagtaagaggagcaggctcctgcacagtgactacatgaacatgactccccgccgccccgggcccacccg |
| | costimulatory | caagcattaccagccctatgccccaccacgcgacttcgcagcctatogetcc |
| | domain (na) | |
| 7 | CD28 | aggagtaagaggagcaggctcctgcacagtgactacatgttcatgactccccgccgccccgggcccaccc |
| | costimulatory | gcaagcattaccagccctatgccccaccacgcgacttcgcagcctatcgctcc |
| | domain (na) | |
| 8 | CD28 | aggagtaagaggagcaggctcctgcacagtgacttcatgaacatgactccccgccgccccgggcccaccc |
| | costimulatory | gcaagcattaccagccctatgccccaccacgcgacttcgcagcctatcgctcc |
| | domain (na) | |
| 9 | CD28 | aggagtaagaggagcaggctcctgcacagtgacttcatgttcatgactccccgccgccccgggcccacccg |
| | costimulatory | caagcattaccagccctatgccccaccacgcgacttcgcagcctatcgctcc |
| | domain (na) | |

### Cancer Associated Antigens

[0371] In certain aspects, the present invention provides immune effector cells (e.g., T cells, NK cells) that are engineered to contain one or more CARs that direct the immune effector cells to cancer. This is achieved through an antigen binding domain on the CAR that is specific for a cancer associated antigen. There are two classes of cancer associated antigens (tumor antigens) that can be targeted by the CARs of the instant invention: (1) cancer associated antigens that are expressed on the surface of cancer cells; and (2) cancer associated antigens that itself is intracellar, however, a fragment of such antigen (peptide) is presented on the surface of the cancer cells by MIHC (major histocompatibility complex).

[0372] Accordingly, the present invention provides CARs that target the following cancer associated antigens (tumor antigens): CD19, CD123, CD22, CD30, CD171, CS-1, CLL-1 (CLECL1), CD33, EGFRvIII, GD2, GD3, BCMA, Tn Ag, PSMA, ROR1, FLT3, FAP, TAG72, CD38, CD44v6, CEA, EPCAM, 1B7H-3, KIT, IL-13Ra2, Mesothelin, IL-11Ra, PSCA, VEGFR2, LewisY, CD24, PDGFR-beta, PRSS21, SSEA-4, CD20, Folate receptor alpha, ERBB2 (Her2/neu), MUC1, EGFR, NCAM, Prostase, PAP, ELF2M, Ephrin B2, IGF-I receptor, CAIX, LMP2, gp100, bcr-abl, tyrosinase, EphA2, Fucosyl GM1, sLe, GM3, TGS5, HMWMAA, o-acetyl-GD2, Folate receptor beta, TEM1/CD248, TEM7R, CLDN6, TSHR, GPRC5D, CXORF61, CD97, CD179a, ALK, Polysialic acid, PLAC1, GloboH, NY—BR-1, UPK2, HAVCR1, ADRB3, PANX3, GPR20, LY6K, OR51E2, TARP, WT1, NY-ESO-1, LAGE-1a, legumain, HPV E6,E7, MAGE-A1, MAGE A1, ETV6-AML, sperm protein 17, XAGE1, Tie 2, MAD-CT-1, MAD-CT-2, Fos-related antigen 1, p53, p53 mutant, prostein, survivin and telomerase, PCTA-1/Galectin 8, MelanA/MART1, Ras mutant, hTERT, sarcoma translocation breakpoints, ML-IAP, ERG (TMPRSS2 ETS fusion gene), NA17, PAX3, Androgen receptor, Cyclin B1, MYCN, RhoC, TRP-2, CYP1B1, BORIS, SART3, PAX5, OY-TES1, LCK, AKAP-4, SSX2, RAGE-1, human telomerase reverse transcriptase, RU1, RU2, intestinal carboxyl esterase, mut hsp70-2, CD79a, CD79b, CD72, LAIR1, FCAR, LILRA2, CD300LF, CLEC12A, BST2, EMR2, LY75, GPC3, FCRL5, and IGLL1.

### Tumor-Supporting Antigens

[0373] A CAR described herein can comprise an antigen binding domain (e.g., antibody or antibody fragment, TCR or TCR fragment) that binds to a tumor-supporting antigen (e.g., a tumor-supporting antigen as described herein). In some embodiments, the tumor-supporting antigen is an antigen present on a stromal cell or a myeloid-derived suppressor cell (MDSC). Stromal cells can secrete growth factors to promote cell division in the microenvironment. MDSC cells can inhibit T cell proliferation and activation. Without wishing to be bound by theory, in some embodiments, the CAR-expressing cells destroy the tumor-supporting cells, thereby indirectly inhibiting tumor growth or survival.

[0374] In embodiments, the stromal cell antigen is chosen from one or more of: bone marrow stromal cell antigen 2 (BST2), fibroblast activation protein (FAP) and tenascin. In an embodiment, the FAP-specific antibody is, competes for binding with, or has the same CDRs as, sibrotuzumab. In embodiments, the MDSC antigen is chosen from one or more of: CD33, CD11b, C14, CD15, and CD66b. Accordingly, in some embodiments, the tumor-supporting antigen is chosen from one or more of: bone marrow stromal cell antigen 2 (BST2), fibroblast activation protein (FAP) or tenascin, CD33, CD11b, C14, CD15, and CD66b.

### Exemplary Chimeric Antigen Receptor (CAR)

[0375] The present invention encompasses a recombinant DNA construct comprising sequences encoding a CAR, wherein the CAR comprises an antigen binding domain (e.g., antibody or antibody fragment, TCR or TCR fragment) that binds specifically to a cancer associated antigen described herein, wherein the sequence of the antigen binding domain is contiguous with and in the same reading frame as a nucleic acid sequence encoding an intracellular signaling domain. The intracellular signaling domain can comprise a costimulatory signaling domain and/or a primary signaling domain, e.g., a zeta chain. The costimulatory signaling domain refers to a portion of the CAR comprising at least a portion of the intracellular domain of a costimulatory molecule.

[0376] In specific aspects, a CAR construct of the invention comprises a scFv domain, wherein the scFv may be preceded by an optional leader sequence such as provided in SEQ ID NO: 401, and followed by an optional hinge sequence such as provided in SEQ ID NO:403 or SEQ ID NO:405 or SEQ ID NO:407 or SEQ ID NO: 10, a transmembrane region such as provided in SEQ ID NO:12, an intracellular signalling domain that includes SEQ ID NO:14, 16, 427-430, or 5, and a CD3 zeta sequence that includes SEQ ID NO:18 or SEQ ID NO:20, e.g., wherein the domains are contiguous with and in the same reading frame to form a single fusion protein.

[0377] In one aspect, an exemplary CAR constructs comprise an optional leader sequence (e.g., a leader sequence described herein), an extracellular antigen binding domain (e.g., an antigen binding domain described herein), a hinge (e.g., a hinge region described herein), a transmembrane domain (e.g., a transmembrane domain described herein), and an intracellular stimulatory domain (e.g., an intracellular stimulatory domain described herein). In one aspect, an exemplary CAR construct comprises an optional leader sequence (e.g., a leader sequence described herein), an extracellular antigen binding domain (e.g., an antigen binding domain described herein), a hinge (e.g., a hinge region described herein), a transmembrane domain (e.g., a transmembrane domain described herein), an intracellular costimulatory signaling domain (e.g., a costimulatory signaling domain described herein) and/or an intracellular primary signaling domain (e.g., a primary signaling domain described herein).

[0378] An exemplary leader sequence is provided as SEQ ID NO: 401. An exemplary hinge/spacer sequence is provided as SEQ ID NO: 403 or SEQ ID NO:405 or SEQ ID NO:407 or SEQ ID NO:10. An exemplary transmembrane domain sequence is provided as SEQ ID NO:12. An exemplary sequence of the intracellular signaling domain of CD28 is provided as SEQ ID NOs: 427-430 and 5. An exemplary CD3zeta domain sequence is provided as SEQ ID NO: 18 or SEQ ID NO:20.

[0379] In one aspect, the present invention encompasses a recombinant nucleic acid construct comprising a nucleic acid molecule encoding a CAR, wherein the nucleic acid molecule comprises the nucleic acid sequence encoding an antigen binding domain, e.g., described herein, that is contiguous with and in the same reading frame as a nucleic acid sequence encoding an intracellular signaling domain.

[0380] In one aspect, the present invention encompasses a recombinant nucleic acid construct comprising a nucleic acid molecule encoding a CAR, wherein the nucleic acid molecule comprises a nucleic acid sequence encoding an antigen binding domain, wherein the sequence is contiguous with and in the same reading frame as the nucleic acid sequence encoding an intracellular signaling domain. An exemplary intracellular signaling domain that can be used in the CAR includes, but is not limited to, one or more intracellular signaling domains of, e.g., CD3-zeta, CD28, CD27, 4-1BB, a functional variant thereof, and the like. In some instances, the CAR can comprise any combination of CD3-zeta, CD28, 4-1BB, and the like.

[0381] The nucleic acid sequences coding for the desired molecules can be obtained using recombinant methods known in the art, such as, for example by screening libraries from cells expressing the nucleic acid molecule, by deriving the nucleic acid molecule from a vector known to include the same, or by isolating directly from cells and tissues containing the same, using standard techniques. Alternatively, the nucleic acid of interest can be produced synthetically, rather than cloned.

[0382] The present invention includes retroviral and lentiviral vector constructs expressing a CAR that can be directly transduced into a cell.

[0383] The present invention also includes an RNA construct that can be directly transfected into a cell. A method for generating mRNA for use in transfection involves in vitro transcription (IVT) of a template with specially designed primers, followed by polyA addition, to produce a construct containing 3′ and 5′ untranslated sequence (“UTR”) (e.g., a 3′ and/or 5′ UTR described herein), a 5′ cap (e.g., a 5′ cap described herein) and/or Internal Ribosome Entry Site (IRES) (e.g., an IRES described herein), the nucleic acid to be expressed, and a polyA tail, typically 50-2000 bases in length (SEQ ID NO:32). RNA so produced can efficiently transfect different kinds of cells. In one embodiment, the template includes sequences for the CAR. In an embodiment, an RNA CAR vector is transduced into a cell, e.g., a T cell or a NK cell, by electroporation.

### Antigen Binding Domain

[0384] In one aspect, the CAR of the invention comprises a target-specific binding element otherwise referred to as an antigen binding domain. The choice of moiety depends upon the type and number of ligands that define the surface of a target cell. For example, the antigen binding domain may be chosen to recognize a ligand that acts as a cell surface marker on target cells associated with a particular disease state. Thus, examples of cell surface markers that may act as ligands for the antigen binding domain in a CAR of the invention include those associated with viral, bacterial and parasitic infections, autoimmune disease and cancer cells.

[0385] In one aspect, the CAR-mediated T-cell response can be directed to an antigen of interest by way of engineering an antigen binding domain that specifically binds a desired antigen into the CAR.

[0386] In one aspect, the portion of the CAR comprising the antigen binding domain comprises an antigen binding domain that targets a tumor antigen, e.g., a tumor antigen described herein.

[0387] The antigen binding domain can be any domain that binds to the antigen including but not limited to a monoclonal antibody, a polyclonal antibody, a recombinant antibody, a human antibody, a humanized antibody, and a functional fragment thereof, including but not limited to a single-domain antibody such as a heavy chain variable domain (VH), a light chain variable domain (VL) and a variable domain (VHH) of camelid derived nanobody, and to an alternative scaffold known in the art to function as antigen binding domain, such as a recombinant fibronectin domain, a T cell receptor (TCR), or a fragment there of, e.g., single chain TCR, and the like. In some instances, it is beneficial for the antigen binding domain to be derived from the same species in which the CAR will ultimately be used in. For example, for use in humans, it may be beneficial for the antigen binding domain of the CAR to comprise human or humanized residues for the antigen binding domain of an antibody or antibody fragment.

[0388] In one embodiment, an antigen binding domain against CD22 is an antigen binding portion, e.g., CDRs, of an antibody described in, e.g., Haso et al., Blood, 121(7): 1165-1174 (2013); Wayne et al., Clin Cancer Res 16(6): 1894-1903 (2010); Kato et al., Leuk Res 37(1):83-88 (2013); Creative BioMart (creativebiomart.net): MOM-18047-S(P).

[0389] In one embodiment, an antigen binding domain against CS-1 is an antigen binding portion, e.g., CDRs, of Elotuzumab (BMS), see e.g., Tai et al., 2008, Blood 112(4):1329-37; Tai et al., 2007, Blood. 110(5):1656-63.

[0390] In one embodiment, an antigen binding domain against CLL-1 is an antigen binding portion, e.g., CDRs, of an antibody available from R&D, ebiosciences, Abcam, for example, PE-CLL1-hu Cat #353604 (BioLegend); and PE-CLL1 (CLEC12A) Cat #562566 (BD).

[0391] In one embodiment, an antigen binding domain against CD33 is an antigen binding portion, e.g., CDRs, of an antibody described in, e.g., Bross et al., Clin Cancer Res 7(6):1490-1496 (2001) (Gemtuzumab Ozogamicin, hP67.6),Caron et al., Cancer Res 52(24):6761-6767 (1992) (Lintuzumab, HuM195), Lapusan et al., Invest New Drugs 30(3):1121-1131 (2012) (AVE9633), Aigner et al., Leukemia 27(5): 1107-1115 (2013) (AMG330, CD33 BiTE), Dutour et al., Adv hematol 2012:683065 (2012), and Pizzitola et al., Leukemia doi:10.1038/Lue.2014.62 (2014).

[0392] In one embodiment, an antigen binding domain against GD2 is an antigen binding portion, e.g., CDRs, of an antibody described in, e.g., Mujoo et al., Cancer Res. 47(4):1098-1104 (1987); Cheung et al., Cancer Res 45(6):2642-2649 (1985), Cheung et al., J Clin Oncol 5(9):1430-1440 (1987), Cheung et al., J Clin Oncol 16(9):3053-3060 (1998), Handgretinger et al., Cancer Immunol Immunother 35(3):199-204 (1992). In some embodiments, an antigen binding domain against GD2 is an antigen binding portion of an antibody selected from mAb 14.18, 14G2a, ch14.18, hu14.18, 3F8, hu3F8, 3G6, 8B6, 60C3, 10B8, ME36.1, and 8H9, see e.g., WO2012033885, WO2013040371, WO2013192294, WO2013061273, WO2013123061, WO2013074916, and WO201385552. In some embodiments, an antigen binding domain against GD2 is an antigen binding portion of an antibody described in US Publication No.: 20100150910 or PCT Publication No.: WO 2011160119.

[0393] In one embodiment, an antigen binding domain against BCMA is an antigen binding portion, e.g., CDRs, of an antibody described in, e.g., WO2012163805, WO200112812, and WO2003062401.

[0394] In one embodiment, an antigen binding domain against Tn antigen is an antigen binding portion, e.g., CDRs, of an antibody described in, e.g., U.S. Pat. No. 8,440,798, Brooks et al., PNAS 107(22):10056-10061 (2010), and Stone et al., OncoImmunology 1(6):863-873(2012).

[0395] In one embodiment, an antigen binding domain against PSMA is an antigen binding portion, e.g., CDRs, of an antibody described in, e.g., Parker et al., Protein Expr Purif 89(2):136-145 (2013), US 20110268656 (J591 ScFv); Frigerio et al, European J Cancer 49(9):2223-2232 (2013) (scFvD2B); WO 2006125481 (mAbs 3/A12, 3/E7 and 3/F11) and single chain antibody fragments (scFv A5 and D7).

[0396] In one embodiment, an antigen binding domain against ROR1 is an antigen binding portion, e.g., CDRs, of an antibody described in, e.g., Hudecek et al., Clin Cancer Res 19(12):3153-3164 (2013); WO 2011159847; and US20130101607.

[0397] In one embodiment, an antigen binding domain against FLT3 is an antigen binding portion, e.g., CDRs, of an antibody described in, e.g., WO2011076922, U.S. Pat. No. 5,777,084, EP0754230, US20090297529, and several commercial catalog antibodies (R&D, ebiosciences, Abcam).

[0398] In one embodiment, an antigen binding domain against TAG72 is an antigen binding portion, e.g., CDRs, of an antibody described in, e.g., Hombach et al., Gastroenterology 113(4):1163-1170 (1997); and Abcam ab691.

[0399] In one embodiment, an antigen binding domain against FAP is an antigen binding portion, e.g., CDRs, of an antibody described in, e.g., Ostermann et al., Clinical Cancer Research 14:4584-4592 (2008) (FAP5), US Pat. Publication No. 2009/0304718; sibrotuzumab (see e.g., Hofheinz et al., Oncology Research and Treatment 26(1), 2003); and Tran et al., J Exp Med 210(6):1125-1135 (2013).

[0400] In one embodiment, an antigen binding domain against CD38 is an antigen binding portion, e.g., CDRs, of daratumumab (see, e.g., Groen et al., Blood 116(21):1261-1262 (2010); MOR202 (see, e.g., U.S. Pat. No. 8,263,746); or antibodies described in U.S. Pat. No. 8,362,211.

[0401] In one embodiment, an antigen binding domain against CD44v6 is an antigen binding portion, e.g., CDRs, of an antibody described in, e.g., Casucci et al., Blood 122(20):3461-3472 (2013).

[0402] In one embodiment, an antigen binding domain against CEA is an antigen binding portion, e.g., CDRs, of an antibody described in, e.g., Chmielewski et al., Gastoenterology 143(4):1095-1107 (2012).

[0403] In one embodiment, an antigen binding domain against EPCAM is an antigen binding portion, e.g., CDRS, of an antibody selected from MT110, EpCAM-CD3 bispecific Ab (see, e.g., clinicaltrials.gov/ct2/show/NCT00635596); Edrecolomab; 3622W94; ING-1; and adecatumumab (MT201).

[0404] In one embodiment, an antigen binding domain against PRSS21 is an antigen binding portion, e.g., CDRs, of an antibody described in U.S. Pat. No. 8,080,650.

[0405] In one embodiment, an antigen binding domain against B7H3 is an antigen binding portion, e.g., CDRs, of an antibody MGA271 (Macrogenics).

[0406] In one embodiment, an antigen binding domain against KIT is an antigen binding portion, e.g., CDRs, of an antibody described in, e.g., U.S. Pat. No. 7,915,391, US20120288506, and several commercial catalog antibodies.

[0407] In one embodiment, an antigen binding domain against IL-13Ra2 is an antigen binding portion, e.g., CDRs, of an antibody described in, e.g., WO2008/146911, WO2004087758, several commercial catalog antibodies, and WO2004087758.

[0408] In one embodiment, an antigen binding domain against CD30 is an antigen binding portion, e.g., CDRs, of an antibody described in, e.g., U.S. Pat. No. 7,090,843 B1, and EP0805871.

[0409] In one embodiment, an antigen binding domain against GD3 is an antigen binding portion, e.g., CDRs, of an antibody described in, e.g., U.S. Pat. Nos. 7,253,263; 8,207,308; US 20120276046; EP1013761; WO2005035577; and U.S. Pat. No. 6,437,098.

[0410] In one embodiment, an antigen binding domain against CD171 is an antigen binding portion, e.g., CDRs, of an antibody described in, e.g., Hong et al., J Immunother 37(2):93-104 (2014).

[0411] In one embodiment, an antigen binding domain against IL-11Ra is an antigen binding portion, e.g., CDRs, of an antibody available from Abcam (cat #ab55262) or Novus Biologicals (cat #EPR5446). In another embodiment, an antigen binding domain again IL-11Ra is a peptide, see, e.g., Huang et al., Cancer Res 72(1):271-281 (2012).

[0412] In one embodiment, an antigen binding domain against PSCA is an antigen binding portion, e.g., CDRs, of an antibody described in, e.g., Morgenroth et al., Prostate 67(10):1121-1131 (2007) (scFv 7F5); Nejatollahi et al., J of Oncology 2013(2013), article ID 839831 (scFv C5-II); and US Pat Publication No. 20090311181.

[0413] In one embodiment, an antigen binding domain against VEGFR2 is an antigen binding portion, e.g., CDRs, of an antibody described in, e.g., Chinnasamy et al., J Clin Invest 120(11):3953-3968 (2010).

[0414] In one embodiment, an antigen binding domain against LewisY is an antigen binding portion, e.g., CDRs, of an antibody described in, e.g., Kelly et al., Cancer Biother Radiopharm 23(4):411-423 (2008) (hu3S193 Ab (scFvs)); Dolezal et al., Protein Engineering 16(1):47-56 (2003) (NC10 scFv).

[0415] In one embodiment, an antigen binding domain against CD24 is an antigen binding portion, e.g., CDRs, of an antibody described in, e.g., Maliar et al., Gastroenterology 143(5):1375-1384 (2012).

[0416] In one embodiment, an antigen binding domain against PDGFR-beta is an antigen binding portion, e.g., CDRs, of an antibody Abcam ab32570.

[0417] In one embodiment, an antigen binding domain against SSEA-4 is an antigen binding portion, e.g., CDRs, of antibody MC813 (Cell Signaling), or other commercially available antibodies.

[0418] In one embodiment, an antigen binding domain against CD20 is an antigen binding portion, e.g., CDRs, of the antibody Rituximab, Ofatumumab, Ocrelizumab, Veltuzumab, or GA101.

[0419] In one embodiment, an antigen binding domain against Folate receptor alpha is an antigen binding portion, e.g., CDRs, of the antibody IMGN853, or an antibody described in US20120009181; U.S. Pat. No. 4,851,332, LK26: U.S. Pat. No. 5,952,484.

[0420] In one embodiment, an antigen binding domain against ERBB2 (Her2/neu) is an antigen binding portion, e.g., CDRs, of the antibody trastuzumab, or pertuzumab.

[0421] In one embodiment, an antigen binding domain against MUC1 is an antigen binding portion, e.g., CDRs, of the antibody SAR566658.

[0422] In one embodiment, the antigen binding domain against EGFR is antigen binding portion, e.g., CDRs, of the antibody cetuximab, panitumumab, zalutumumab, nimotuzumab, or matuzumab.

[0423] In one embodiment, an antigen binding domain against NCAM is an antigen binding portion, e.g., CDRs, of the antibody clone 2-2B: MAB5324 (EMD Millipore)

[0424] In one embodiment, an antigen binding domain against Ephrin B2 is an antigen binding portion, e.g., CDRs, of an antibody described in, e.g., Abengozar et al., Blood 119(19):4565-4576 (2012).

[0425] In one embodiment, an antigen binding domain against IGF-I receptor is an antigen binding portion, e.g., CDRs, of an antibody described in, e.g., U.S. Pat. No. 8,344,112 B2; EP2322550 A1; WO 2006/138315, or PCT/US2006/022995.

[0426] In one embodiment, an antigen binding domain against CAIX is an antigen binding portion, e.g., CDRs, of the antibody clone 303123 (R&D Systems).

[0427] In one embodiment, an antigen binding domain against LMP2 is an antigen binding portion, e.g., CDRs, of an antibody described in, e.g., U.S. Pat. No. 7,410,640, or US20050129701.

[0428] In one embodiment, an antigen binding domain against gp100 is an antigen binding portion, e.g., CDRs, of the antibody HMB45, NKIbetaB, or an antibody described in WO2013165940, or US20130295007

[0429] In one embodiment, an antigen binding domain against tyrosinase is an antigen binding portion, e.g., CDRs, of an antibody described in, e.g., U.S. Pat. No. 5,843,674; or US19950504048.

[0430] In one embodiment, an antigen binding domain against EphA2 is an antigen binding portion, e.g., CDRs, of an antibody described in, e.g., Yu et al., Mol Ther 22(1):102-111 (2014).

[0431] In one embodiment, an antigen binding domain against GD3 is an antigen binding portion, e.g., CDRs, of an antibody described in, e.g., U.S. Pat. Nos. 7,253,263; 8,207,308; US 20120276046; EP1013761 A3; 20120276046; WO2005035577; or U.S. Pat. No. 6,437,098.

[0432] In one embodiment, an antigen binding domain against fucosyl GM1 is an antigen binding portion, e.g., CDRs, of an antibody described in, e.g., US20100297138; or WO2007/067992.

[0433] In one embodiment, an antigen binding domain against sLe is an antigen binding portion, e.g., CDRs, of the antibody G193 (for lewis Y), see Scott A M et al, Cancer Res 60: 3254-61 (2000), also as described in Neeson et al, J Immunol May 2013 190 (Meeting Abstract Supplement) 177.10.

[0434] In one embodiment, an antigen binding domain against GM3 is an antigen binding portion, e.g., CDRs, of the antibody CA 2523449 (mAb 14F7).

[0435] In one embodiment, an antigen binding domain against HMWMAA is an antigen binding portion, e.g., CDRs, of an antibody described in, e.g., Kmiecik et al., Oncoimmunology 3(1):e27185 (2014) (PMID: 24575382) (mAb9.2.27); U.S. Pat. No. 6,528,481; WO2010033866; or US 20140004124.

[0436] In one embodiment, an antigen binding domain against o-acetyl-GD2 is an antigen binding portion, e.g., CDRs, of the antibody 8B6.

[0437] In one embodiment, an antigen binding domain against TEM1/CD248 is an antigen binding portion, e.g., CDRs, of an antibody described in, e.g., Marty et al., Cancer Lett 235(2):298-308 (2006); Zhao et al., J Immunol Methods 363(2):221-232 (2011).

[0438] In one embodiment, an antigen binding domain against CLDN6 is an antigen binding portion, e.g., CDRs, of the antibody IMAB027 (Ganymed Pharmaceuticals), see e.g., clinicaltrial.gov/show/NCT02054351.

[0439] In one embodiment, an antigen binding domain against TSHR is an antigen binding portion, e.g., CDRs, of an antibody described in, e.g., U.S. Pat. Nos. 8,603,466; 8,501,415; or U.S. Pat. No. 8,309,693.

[0440] In one embodiment, an antigen binding domain against GPRC5D is an antigen binding portion, e.g., CDRs, of the antibody FAB6300A (R&D Systems); or LS-A4180 (Lifespan Biosciences).

[0441] In one embodiment, an antigen binding domain against CD97 is an antigen binding portion, e.g., CDRs, of an antibody described in, e.g., U.S. Pat. No. 6,846,911; de Groot et al., J Immunol 183(6):4127-4134 (2009); or an antibody from R&D:MAB3734.

[0442] In one embodiment, an antigen binding domain against ALK is an antigen binding portion, e.g., CDRs, of an antibody described in, e.g., Mino-Kenudson et al., Clin Cancer Res 16(5):1561-1571 (2010).

[0443] In one embodiment, an antigen binding domain against polysialic acid is an antigen binding portion, e.g., CDRs, of an antibody described in, e.g., Nagae et al., J Biol Chem 288(47):33784-33796 (2013).

[0444] In one embodiment, an antigen binding domain against PLAC1 is an antigen binding portion, e.g., CDRs, of an antibody described in, e.g., Ghods et al., Biotechnol Appl Biochem 2013 doi:10.1002/bab.1177.

[0445] In one embodiment, an antigen binding domain against GloboH is an antigen binding portion of the antibody VK9; or an antibody described in, e.g., Kudryashov V et al, Glycoconj J. 15(3):243-9 (1998), Lou et al., Proc Natl Acad Sci USA 111(7):2482-2487 (2014); MBrl: Bremer E-G et al. J Biol Chem 259:14773-14777 (1984).

[0446] In one embodiment, an antigen binding domain against NY—BR-1 is an antigen binding portion, e.g., CDRs of an antibody described in, e.g., Jager et al., Appl Immunohistochem Mol Morphol 15(1):77-83 (2007).

[0447] In one embodiment, an antigen binding domain against WT-1 is an antigen binding portion, e.g., CDRs, of an antibody described in, e.g., Dao et al., Sci Transl Med 5(176):176ra33 (2013); or WO2012/135854.

[0448] In one embodiment, an antigen binding domain against MAGE-A1 is an antigen binding portion, e.g., CDRs, of an antibody described in, e.g., Willemsen et al., J Immunol 174(12):7853-7858 (2005) (TCR-like scFv).

[0449] In one embodiment, an antigen binding domain against sperm protein 17 is an antigen binding portion, e.g., CDRs, of an antibody described in, e.g., Song et al., Target Oncol 2013 Aug. 14 (PMID: 23943313); Song et al., Med Oncol 29(4):2923-2931 (2012).

[0450] In one embodiment, an antigen binding domain against Tie 2 is an antigen binding portion, e.g., CDRs, of the antibody AB33 (Cell Signaling Technology).

[0451] In one embodiment, an antigen binding domain against MAD-CT-2 is an antigen binding portion, e.g., CDRs, of an antibody described in, e.g., PMID: 2450952; U.S. Pat. No. 7,635,753.

[0452] In one embodiment, an antigen binding domain against Fos-related antigen 1 is an antigen binding portion, e.g., CDRs, of the antibody 12F9 (Novus Biologicals).

[0453] In one embodiment, an antigen binding domain against MelanA/MART1 is an antigen binding portion, e.g., CDRs, of an antibody described in, EP2514766 A2; or U.S. Pat. No. 7,749,719.

[0454] In one embodiment, an antigen binding domain against sarcoma translocation breakpoints is an antigen binding portion, e.g., CDRs, of an antibody described in, e.g., Luo et al, EMBO Mol. Med. 4(6):453-461 (2012).

[0455] In one embodiment, an antigen binding domain against TRP-2 is an antigen binding portion, e.g., CDRs, of an antibody described in, e.g., Wang et al, J Exp Med. 184(6):2207-16 (1996).

[0456] In one embodiment, an antigen binding domain against CYP1B1 is an antigen binding portion, e.g., CDRs, of an antibody described in, e.g., Maecker et al, Blood 102 (9): 3287-3294 (2003).

[0457] In one embodiment, an antigen binding domain against RAGE-1 is an antigen binding portion, e.g., CDRs, of the antibody MAB5328 (EMD Millipore).

[0458] In one embodiment, an antigen binding domain against human telomerase reverse transcriptase is an antigen binding portion, e.g., CDRs, of the antibody cat no: LS-B95-100 (Lifespan Biosciences)

[0459] In one embodiment, an antigen binding domain against intestinal carboxyl esterase is an antigen binding portion, e.g., CDRs, of the antibody 4F12: cat no: LS-B6190-50 (Lifespan Biosciences).

[0460] In one embodiment, an antigen binding domain against mut hsp70-2 is an antigen binding portion, e.g., CDRs, of the antibody Lifespan Biosciences: monoclonal: cat no: LS-C133261-100 (Lifespan Biosciences).

[0461] In one embodiment, an antigen binding domain against CD79a is an antigen binding portion, e.g., CDRs, of the antibody Anti-CD79a antibody [HM47/A9](ab3121), available from Abcam; antibody CD79A Antibody #3351 available from Cell Signalling Technology; or antibody HPA017748—Anti-CD79A antibody produced in rabbit, available from Sigma Aldrich.

[0462] In one embodiment, an antigen binding domain against CD79b is an antigen binding portion, e.g., CDRs, of the antibody polatuzumab vedotin, anti-CD79b described in Doman et al., “Therapeutic potential of an anti-CD79b antibody-drug conjugate, anti-CD79b-vc-MMAE, for the treatment of non-Hodgkin lymphoma” Blood. 2009 Sep. 24; 114(13):2721-9. doi: 10.1182/blood-2009-02-205500. Epub 2009 Jul. 24, or the bispecific antibody Anti-CD79b/CD3 described in “4507 Pre-Clinical Characterization of T Cell-Dependent Bispecific Antibody Anti-CD79b/CD3 As a Potential Therapy for B Cell Malignancies” Abstracts of 56^{th} ASH Annual Meeting and Exposition, San Francisco, CA Dec. 6-9 2014.

[0463] In one embodiment, an antigen binding domain against CD72 is an antigen binding portion, e.g., CDRs, of the antibody J3-109 described in Myers, and Uckun, “An anti-CD72 immunotoxin against therapy-refractory B-lineage acute lymphoblastic leukemia.” Leuk Lymphoma. 1995 June; 18(1-2):119-22, or anti-CD72 (10D6.8.1, mIgG1) described in Polson et al., “Antibody-Drug Conjugates for the Treatment of Non-Hodgkin's Lymphoma: Target and Linker-Drug Selection” Cancer Res Mar. 15, 2009 69; 2358.

[0464] In one embodiment, an antigen binding domain against LAIR1 is an antigen binding portion, e.g., CDRs, of the antibody ANT-301 LAIR1 antibody, available from ProSpec; or anti-human CD305 (LAIR1) Antibody, available from BioLegend.

[0465] In one embodiment, an antigen binding domain against FCAR is an antigen binding portion, e.g., CDRs, of the antibody CD89/FCARAntibody (Catalog #10414-H08H), available from Sino Biological Inc.

[0466] In one embodiment, an antigen binding domain against LILRA2 is an antigen binding portion, e.g., CDRs, of the antibody LILRA2 monoclonal antibody (M17), clone 3C7, available from Abnova, or Mouse Anti-LILRA2 antibody, Monoclonal (2D7), available from Lifespan Biosciences.

[0467] In one embodiment, an antigen binding domain against CD300LF is an antigen binding portion, e.g., CDRs, of the antibody Mouse Anti-CMRF35-like molecule 1 antibody, Monoclonal[UP-D2], available from BioLegend, or Rat Anti-CMRF35-like molecule 1 antibody, Monoclonal[234903], available from R&D Systems.

[0468] In one embodiment, an antigen binding domain against CLEC12A is an antigen binding portion, e.g., CDRs, of the antibody Bispecific T cell Engager (BiTE) scFv-antibody and ADC described in Noordhuis et al., “Targeting of CLEC12A In Acute Myeloid Leukemia by Antibody-Drug-Conjugates and Bispecific CLL-1×CD3 BiTE Antibody” 53^{rd} ASH Annual Meeting and Exposition, Dec. 10-13, 2011, and MCLA-117 (Merus).

[0469] In one embodiment, an antigen binding domain against BST2 (also called CD317) is an antigen binding portion, e.g., CDRs, of the antibody Mouse Anti-CD317 antibody, Monoclonal[3H4], available from Antibodies-Online or Mouse Anti-CD317 antibody, Monoclonal[696739], available from R&D Systems.

[0470] In one embodiment, an antigen binding domain against EMR2 (also called CD312) is an antigen binding portion, e.g., CDRs, of the antibody Mouse Anti-CD312 antibody, Monoclonal[LS-B8033] available from Lifespan Biosciences, or Mouse Anti-CD312 antibody, Monoclonal[494025] available from R&D Systems.

[0471] In one embodiment, an antigen binding domain against LY75 is an antigen binding portion, e.g., CDRs, of the antibody Mouse Anti-Lymphocyte antigen 75 antibody, Monoclonal[HD30] available from EMD Millipore or Mouse Anti-Lymphocyte antigen 75 antibody, Monoclonal[A15797] available from Life Technologies.

[0472] In one embodiment, an antigen binding domain against GPC3 is an antigen binding portion, e.g., CDRs, of the antibody hGC33 described in Nakano K, Ishiguro T, Konishi H, et al. Generation of a humanized anti-glypican 3 antibody by CDR grafting and stability optimization. Anticancer Drugs. 2010 November; 21(10):907-916, or MDX-1414, HN3, or YP7, all three of which are described in Feng et al., “Glypican-3 antibodies: a new therapeutic target for liver cancer.” FEBS Lett. 2014 Jan. 21; 588(2):377-82.

[0473] In one embodiment, an antigen binding domain against FCRL5 is an antigen binding portion, e.g., CDRs, of the anti-FcRL5 antibody described in Elkins et al., “FcRL5 as a target of antibody-drug conjugates for the treatment of multiple myeloma” Mol Cancer Ther. 2012 October; 11(10):2222-32.

[0474] In one embodiment, an antigen binding domain against IGLL1 is an antigen binding portion, e.g., CDRs, of the antibody Mouse Anti-Immunoglobulin lambda-like polypeptide 1 antibody, Monoclonal[AT1G4] available from Lifespan Biosciences, Mouse Anti-Immunoglobulin lambda-like polypeptide 1 antibody, Monoclonal[HSL11] available from BioLegend.

[0475] In one embodiment, the antigen binding domain comprises one, two three (e.g., all three) heavy chain CDRs, HC CDR1, HC CDR2 and HC CDR3, from an antibody listed above, and/or one, two, three (e.g., all three) light chain CDRs, LC CDR1, LC CDR2 and LC CDR3, from an antibody listed above. In one embodiment, the antigen binding domain comprises a heavy chain variable region and/or a variable light chain region of an antibody listed above.

[0476] In another aspect, the antigen binding domain comprises a humanized antibody or an antibody fragment. In some aspects, a non-human antibody is humanized, where specific sequences or regions of the antibody are modified to increase similarity to an antibody naturally produced in a human or fragment thereof. In one aspect, the antigen binding domain is humanized.

[0477] A humanized antibody can be produced using a variety of techniques known in the art, including but not limited to, CDR-grafting (see, e.g., European Patent No. EP 239,400; International Publication No. WO 91/09967; and U.S. Pat. Nos. 5,225,539, 5,530,101, and 5,585,089, each of which is incorporated herein in its entirety by reference), veneering or resurfacing (see, e.g., European Patent Nos. EP 592,106 and EP 519,596; Padlan, 1991, Molecular Immunology, 28(4/5):489-498; Studnicka et al., 1994, Protein Engineering, 7(6):805-814; and Roguska et al., 1994, PNAS, 91:969-973, each of which is incorporated herein by its entirety by reference), chain shuffling (see, e.g., U.S. Pat. No. 5,565,332, which is incorporated herein in its entirety by reference), and techniques disclosed in, e.g., U.S. Patent Application Publication No. US2005/0042664, U.S. Patent Application Publication No. US2005/0048617, U.S. Pat. Nos. 6,407,213, 5,766,886, International Publication No. WO 9317105, Tan et al., J. Immunol., 169:1119-25 (2002), Caldas et al., Protein Eng., 13(5):353-60 (2000), Morea et al., Methods, 20(3):267-79 (2000), Baca et al., J. Biol. Chem., 272(16):10678-84 (1997), Roguska et al., Protein Eng., 9(10):895-904 (1996), Couto et al., Cancer Res., 55 (23 Supp): 5973s-5977s (1995), Couto et al., Cancer Res., 55(8):1717-22 (1995), Sandhu J S, Gene, 150(2):409-10 (1994), and Pedersen et al., J. Mol. Biol., 235(3):959-73 (1994), each of which is incorporated herein in its entirety by reference. Often, framework residues in the framework regions will be substituted with the corresponding residue from the CDR donor antibody to alter, for example improve, antigen binding. These framework substitutions are identified by methods well-known in the art, e.g., by modeling of the interactions of the CDR and framework residues to identify framework residues important for antigen binding and sequence comparison to identify unusual framework residues at particular positions. (See, e.g., Queen et al., U.S. Pat. No. 5,585,089; and Riechmann et al., 1988, Nature, 332:323, which are incorporated herein by reference in their entireties.)

[0478] A humanized antibody or antibody fragment has one or more amino acid residues remaining in it from a source which is nonhuman. These nonhuman amino acid residues are often referred to as “import” residues, which are typically taken from an “import” variable domain. As provided herein, humanized antibodies or antibody fragments comprise one or more CDRs from nonhuman immunoglobulin molecules and framework regions wherein the amino acid residues comprising the framework are derived completely or mostly from human germline. Multiple techniques for humanization of antibodies or antibody fragments are well-known in the art and can essentially be performed following the method of Winter and co-workers (Jones et al., Nature, 321:522-525 (1986); Riechmann et al., Nature, 332:323-327 (1988); Verhoeyen et al., Science, 239:1534-1536 (1988)), by substituting rodent CDRs or CDR sequences for the corresponding sequences of a human antibody, i.e., CDR-grafting (EP 239,400; PCT Publication No. WO 91/09967; and U.S. Pat. Nos. 4,816,567; 6,331,415; 5,225,539; 5,530,101; 5,585,089; 6,548,640, the contents of which are incorporated herein by reference herein in their entirety). In such humanized antibodies and antibody fragments, substantially less than an intact human variable domain has been substituted by the corresponding sequence from a nonhuman species. Humanized antibodies are often human antibodies in which some CDR residues and possibly some framework (FR) residues are substituted by residues from analogous sites in rodent antibodies. Humanization of antibodies and antibody fragments can also be achieved by veneering or resurfacing (EP 592,106; EP 519,596; Padlan, 1991, Molecular Immunology, 28(4/5):489-498; Studnicka et al., Protein Engineering, 7(6):805-814 (1994); and Roguska et al., PNAS, 91:969-973 (1994)) or chain shuffling (U.S. Pat. No. 5,565,332), the contents of which are incorporated herein by reference herein in their entirety.

[0479] The choice of human variable domains, both light and heavy, to be used in making the humanized antibodies is to reduce antigenicity. According to the so-called “best-fit” method, the sequence of the variable domain of a rodent antibody is screened against the entire library of known human variable-domain sequences. The human sequence which is closest to that of the rodent is then accepted as the human framework (FR) for the humanized antibody (Sims et al., J. Immunol., 151:2296 (1993); Chothia et al., J. Mol. Biol., 196:901 (1987), the contents of which are incorporated herein by reference herein in their entirety). Another method uses a particular framework derived from the consensus sequence of all human antibodies of a particular subgroup of light or heavy chains. The same framework may be used for several different humanized antibodies (see, e.g., Nicholson et al. Mol. Immun. 34 (16-17): 1157-1165 (1997); Carter et al., Proc. Natl. Acad. Sci. USA, 89:4285 (1992); Presta et al., J. Immunol., 151:2623 (1993), the contents of which are incorporated herein by reference herein in their entirety). In some embodiments, the framework region, e.g., all four framework regions, of the heavy chain variable region are derived from a VH4_4-59 germline sequence. In one embodiment, the framework region can comprise, one, two, three, four or five modifications, e.g., substitutions, e.g., from the amino acid at the corresponding murine sequence. In one embodiment, the framework region, e.g., all four framework regions of the light chain variable region are derived from a VK3_1.25 germline sequence. In one embodiment, the framework region can comprise, one, two, three, four or five modifications, e.g., substitutions, e.g., from the amino acid at the corresponding murine sequence.

[0480] In some aspects, the portion of a CAR composition of the invention that comprises an antibody fragment is humanized with retention of high affinity for the target antigen and other favorable biological properties. According to one aspect of the invention, humanized antibodies and antibody fragments are prepared by a process of analysis of the parental sequences and various conceptual humanized products using three-dimensional models of the parental and humanized sequences. Three-dimensional immunoglobulin models are commonly available and are familiar to those skilled in the art. Computer programs are available which illustrate and display probable three-dimensional conformational structures of selected candidate immunoglobulin sequences. Inspection of these displays permits analysis of the likely role of the residues in the functioning of the candidate immunoglobulin sequence, e.g., the analysis of residues that influence the ability of the candidate immunoglobulin to bind the target antigen. In this way, FR residues can be selected and combined from the recipient and import sequences so that the desired antibody or antibody fragment characteristic, such as increased affinity for the target antigen, is achieved. In general, the CDR residues are directly and most substantially involved in influencing antigen binding.

[0481] A humanized antibody or antibody fragment may retain a similar antigenic specificity as the original antibody, e.g., in the present invention, the ability to bind human a cancer associated antigen as described herein. In some embodiments, a humanized antibody or antibody fragment may have improved affinity and/or specificity of binding to human a cancer associated antigen as described herein.

[0482] In one aspect, the antigen binding domain of the invention is characterized by particular functional features or properties of an antibody or antibody fragment. For example, in one aspect, the portion of a CAR composition of the invention that comprises an antigen binding domain specifically binds a tumor antigen as described herein.

[0483] In one aspect, the anti-cancer associated antigen as described herein binding domain is a fragment, e.g., a single chain variable fragment (scFv). In one aspect, the anti-cancer associated antigen as described herein binding domain is a Fv, a Fab, a (Fab′)2, or a bi-functional (e.g. bi-specific) hybrid antibody (e.g., Lanzavecchia et al., Eur. J. Immunol. 17, 105 (1987)). In one aspect, the antibodies and fragments thereof of the invention binds a cancer associated antigen as described herein protein with wild-type or enhanced affinity.

[0484] In some instances, scFvs can be prepared according to method known in the art (see, for example, Bird et al., (1988) Science 242:423-426 and Huston et al., (1988) Proc. Natl. Acad. Sci. USA 85:5879-5883). ScFv molecules can be produced by linking VH and VL regions together using flexible polypeptide linkers. The scFv molecules comprise a linker (e.g., a Ser-Gly linker) with an optimized length and/or amino acid composition. The linker length can greatly affect how the variable regions of a scFv fold and interact. In fact, if a short polypeptide linker is employed (e.g., between 5-10 amino acids) intrachain folding is prevented. Interchain folding is also required to bring the two variable regions together to form a functional epitope binding site. For examples of linker orientation and size see, e.g., Hollinger et al. 1993 Proc Natl Acad. Sci. U.S.A. 90:6444-6448, U.S. Patent Application Publication Nos. 2005/0100543, 2005/0175606, 2007/0014794, and PCT publication Nos. WO2006/020258 and WO2007/024715, is incorporated herein by reference.

[0485] An scFv can comprise a linker of at least 1, 2, 3, 4, 5, 6, 7, 8, 9, 10, 11, 12, 13, 14, 15, 16, 17, 18, 19, 20, 25, 30, 35, 40, 45, 50, or more amino acid residues between its VL and VH regions. The linker sequence may comprise any naturally occurring amino acid. In some embodiments, the linker sequence comprises amino acids glycine and serine. In another embodiment, the linker sequence comprises sets of glycine and serine repeats such as (Gly₄Ser)n, where n is a positive integer equal to or greater than 1 (SEQ ID NO:22). In one embodiment, the linker can be (Gly₄Ser)₄ (SEQ ID NO:29) or (Gly₄Ser)₃ (SEQ ID NO:30). Variation in the linker length may retain or enhance activity, giving rise to superior efficacy in activity studies.

[0486] In another aspect, the antigen binding domain is a T cell receptor (“TCR”), or a fragment thereof, for example, a single chain TCR (scTCR). Methods to make such TCRs are known in the art. See, e.g., Willemsen R A et al, Gene Therapy 7: 1369-1377 (2000); Zhang T et al, Cancer Gene Ther 11: 487-496 (2004); Aggen et al, Gene Ther. 19(4):365-74 (2012) (references are incorporated herein by its entirety). For example, scTCR can be engineered that contains the Vα and Vβ genes from a T cell clone linked by a linker (e.g., a flexible peptide). This approach is very useful to cancer associated target that itself is intracellar, however, a fragment of such antigen (peptide) is presented on the surface of the cancer cells by MHC.

[0487] In one embodiment, an antigen binding domain against EGFRvIII is an antigen binding portion, e.g., CDRs, of a CAR, antibody or antigen-binding fragment thereof described in, e.g., PCT publication WO2014/130657 or US2014/0322275A1. In one embodiment, the CAR molecule comprises an EGFRvIII CAR, or an antigen binding domain according to Table 2 or SEQ ID NO:11 of WO 2014/130657, incorporated herein by reference, or a sequence substantially identical thereto (e.g., at least 85%, 90%, 95% or more identical thereto). The amino acid and nucleotide sequences encoding the EGFRvIII CAR molecules and antigen binding domains (e.g., including one, two, three VH CDRs; and one, two, three VL CDRs according to Kabat or Chothia), are specified in WO 2014/130657.

[0488] In one embodiment, an antigen binding domain against mesothelin is an antigen binding portion, e.g., CDRs, of an antibody, antigen-binding fragment or CAR described in, e.g., PCT publication WO2015/090230. In one embodiment, an antigen binding domain against mesothelin is an antigen binding portion, e.g., CDRs, of an antibody, antigen-binding fragment, or CAR described in, e.g., PCT publication WO1997/025068, WO1999/028471, WO2005/014652, WO2006/099141, WO2009/045957, WO2009/068204, WO2013/142034, WO2013/040557, or WO2013/063419.

[0489] In an embodiment, the CAR molecule comprises a mesothelin CAR described herein, e.g., a mesothelin CAR described in WO 2015/090230, incorporated herein by reference. In embodiments, the mesothelin CAR comprises an amino acid, or has a nucleotide sequence shown in Tables 2 or 3, or a sequence substantially identical to any of the aforesaid sequences (e.g., at least 85%, 90%, 95% or more identical to any of the aforesaid mesothelin CAR sequences). In one embodiment, the CAR molecule comprises a mesothelin CAR, or an antigen binding domain according to Tables 2-3 of WO 2015/090230, incorporated herein by reference and included in adapted form below, or a sequence substantially identical thereto (e.g., at least 85%, 90%, 95% or more identical thereto). The amino acid and nucleotide sequences encoding the mesothelin CAR molecules and antigen binding domains (e.g., including one, two, three VH CDRs; and one, two, three VL CDRs according to Kabat or Chothia), are specified in WO 2015/090230. Table 2: Amino Acid Sequences of Human scFvs and CARs (bold underline is the leader sequence and grey box is a linker sequence). In the case of the scFvs, the remaining amino acids are the heavy chain variable region and light chain variable regions, with each of the HC CDRs (HC CDR1, HC CDR2, HC CDR3) and LC CDRs (LC CDR1, LC CDR2,

TABLE 2
Amino Acid Sequences of Human scFvs and CARs (bold underline is the leader
sequence and grey box is a linker sequence). In the case of the scFvs,the
remaining amino acids are the heavy chain variable region and light chain
variable regions, with each of the HC CDRs (HC CDR1, HC CDR2, HC CDR3)and
LC CDRs (LC CDR1, LC CDR2,LCCDR3) underlined). In the case of the CARs,the
further remaining amino acids are the remaining amino acids of the CARs.)

| SEQ | | |
|---|---|---|
| ID | | |
| NO: | Description | Amino Acid Sequence |
| 431 | M1 (ScFv | QVQLQQSGAEVKKPGASVKVSCKASGYTFTGYYMHWVRQ |
| | domain) | APGQGLEWMGRINPNSGGTKYAQKFQGRVTMTRDTSISTAYMELSRLRSEDTAVYYCARG |
| | | [chemical structure] |
| | | CRASQSVSSNFAWYQQRPGQAPRLLIYDASNRATGIPPRFSGSGSGTDFTLTISSLEPED |
| | | FAAYYCHQRSNWLYTFGQGTKVDIK |
| 432 | M1 (full) | MALPVTALLLPLALLLHAARPOVOLQQSGAEVKKPGASVKVSCKASGYTFTGYYMHWVRQ |
| | >ZA53- | APGQGLEWMCRINPNSGGTNYAQKFQGRVTMTRDTSISTAYMELSRLRSEDTAVYYCARG |
| | 27BC (M11 ZA53- | [chemical structure] |
| | 27BC | CRASQSVSSNFAWYQQRPGQAPRLLIYDASNRATGIPPRFSGSGSGTDFTLTISSLEPED |
| | R001-A11 | FAAYYCHQRSNWLYTFGQGTKVDIKTTTPAPRPPTPAPTIASQPLSLRPEACRPAAGGAV |
| | 126161) | HTRGLDFACDIYIWAPLAGTCGVLLLSLVITLYCKRGRKKLLYIFKQPFMRPVQTTQEED |
| | | GCSCRFPEEEEGGCELRVKFSRSADAPAYKQGQNQLYNELNLGRREEYDVLDKRRGRDPE |
| | | MGGKPRRKNPQEGLYNELQKDKMAEAYSEIGMKGERRRGKGHDGLYQGLSTATKDTYDAL |
| | | HMQALPPR |
| 433 | M2 (ScFv | QVQLVQSGAEVKKPGASVKVSCKASGYTFTGYYMHWVRQ |
| | domain) | APGQGLEWMGWINPNSGGTKYAQKFQGRVTMTRDTSISTAYMELSRLRSDDTAVYYCARD |
| | | [chemical structure] |
| | | SVGDRVTITCQASQDISNSLNWYQQKAGKAPKLLIYDASTLETGVPSRFSGSGSGTDFSF |
| | | TISSLQPEDIATYYCQQHDNLPLTFGQGTKVEIK |
| 434 | M2 (full) | MALPVTALLLPLALLLHAARPOVOLQQSGAEVKKPGASVKVSCKASGYTFTGYYMHWVRQ |
| | >FA56- | APGQGLEWMCWINPNSGGTNYAQKFQGRVTMTRDTSISTAYMELSRLRSEDTAVYYCARD |
| | 26RC (M2 FA56- | [chemical structure] |
| | 26RC | SVGDRVTITCQASQDISNSLNWYQQKAGKAPKLLIYDASTLETGVPSRFSGSGSGTDFSF |
| | R001-A10 | TISSLQPEDIATYYCQQHDNLPLTFGQGTKVEIKTTTPAPRPPTPAPTIASQPLSLRPEA |
| | 126162) | CRPAAGGAVHTRGLDFACDIYIWAPLAGTCGVLLLSLVITLYCKRGRKKLLYIFKQPFMR |
| | | PVQTTQEEDGCSCRFPEEEEGGCELRVKFSRSADAPAYKQGQNQLYNELNLGRREEYDVL |
| | | DKRRGRDPEMGGKPRRKNPQEGLYNELQKDKMAEAYSEIGMKGERRRGKGHDGLYQGLST |
| | | ATKDTYDALHMQALPPR |
| 435 | M3 (ScFv | QVQLVQSGAEVKKPGAPVKVSCKASGYTFTGYYMHWVRQ |
| | domain) | APGQGLEWMGWINPNSGGTNYAQKFQGRVTMTRDTSISTAYMELSRLRSDDTAVYYCARG |
| | | [chemical structure] |
| | | TITCRASQSINTYLNWYQHKPGKAPKLLIYAASSLQSGVPSRFSGSGSGTDFTLTISSLQ |
| | | PEDFATYYCQQSFSPLTFGGGTKLEIK |
| 436 | M3 | MALPVTALLLPLALLLHAARPOVOLQQSGAEVKKPGASVKVSCKASGYTFTGYYMHWVRQ |
| | >VA58- | APGQGLEWMCWINPNSGGTNYAQKFQGRVTMTRDTSISTAYMELSRLRSEDTAVYYCARG |
| | 21LC (M3 VA58- | [chemical structure] |
| | 21LC | TITCRASQSINTYLNWYQHKPGKAPKLLIYAASSLQSGVPSRFSGSGSGTDFTLTISSLQ |
| | R001-A1 | PEDFATYYCQQSFSPLTFGGGTKLEIKTTTPAPRPPTPAPTIASQPLSLRPEACRPAAGG |
| | 126163) | AVHTRGLDFACDIYIWAPLAGTCGVLLLSLVITLYCKRGRKKLLYIFKQPFMRPVQTTQE |
| | | EDGCSCRFPEEEEGGCELRVKFSRSADAPAYKQGQNQLYNELNLGRREEYDVLDKRRGRD |
| | | PEMGGKPRRKNPQEGLYNELQKDKMAEAYSEIGMKGERRRGKGHDGLYQGLSTATKDTYD |
| | | ALHMQALPPR |
| 437 | M4 (ScFv | QVQLVESGGGLVQPGGSLRLSCAASGFTFSSYWMHWVRQ |
| | domain) | VPGKGLVWVSRINTDGSTTTYADSVEGRFTISRDNAKNTLYLQMNSLRDDDTAVYYCVGG |
| | | [chemical structure] |
| | | SQSISDRLAWYQQKPGKAPKLLIYKASSLESGVPSRFSGSGSGTEFTLTISSLQPDDFAV |
| | | YYCQQYGHLPMYTFGQGTKVEIK |
| 438 | M4 | MALPVTALLLPLALLLHAARPOVOLQQSGAEVKKPGASVKVSCKASGYTFTGYYMHWVRQ |
| | >DP37- | VPGKGLVWVSRINTDGSTTTYADSVEGRFTISRDNAKNTLYLQMNSLRDDDTAVYYCVGG |
| | 07IC (M4 DP37- | [chemical structure] |
| | 07IC | SQSISDRLAWYQQKPGKAPKLLIYKASSLESGVPSRFSGSGSGTEFTLTISSLQPDDFAV |
| | R001-C6 | YYCQQYGHLPMYTFGQGTKVEIKTTTPAPRPPTPAPTIASQPLSLRPEACRPAAGGAVHT |
| | 126164) | RGLDFACDIYIWAPLAGTCGVLLLSLVITLYCKRGRKKLLYIFKQPFMRPVQTTQEEDGC |
| | | SCRFPEEEEGGCELRVKFSRSADAPAYKQGQNQLYNELNLGRREEYDVLDKRRGRDPEMG |
| | | GKPRRKNPQEGLYNELQKDKMAEAYSEIGMKGERRRGKGHDGLYQGLSTATKDTYDALHM |
| | | QALPPR |
| 439 | M5 (ScFv | QVQLVQSGAEVEKPGASVKVSCKASGYTFTDYYMHWVRQ |
| | domain) | APGQGLEWMGWINPNSGGTNYAQKFQGRVTMTRDTSISTAYMELSRLRSDDTAVYYCASG |
| | | [chemical structure] |
| | | ASQSIRYYLSWYQQKPGKAPKLLIYTASILQNGVPSRFSGSGSGTDFTLTISSLQPEDFA |
| | | TYYCLQTYTTPDFGPGTKVEIK |
| 440 | M5 | MALPVTALLLPLALLLHAARPOVOLQQSGAEVKKPGASVKVSCKASGYTFTGYYMHWVRQ |
| | >XP31- | APGQGLEWMCRINPNSGGTNYAQKFQGRVTMTRDTSISTAYMELSRLRSEDTAVYYCASG |
| | 20LC (M5 XP31- | [chemical structure] |
| | 20LC | ASQSIRYYLSWYQQKPGKAPKLLIYTASILQNGVPSRFSGSGSGTDFTLTISSLQPEDFA |
| | R001-B4 | TYYCLQTYTTPDFGPGTKVEIKTTTPAPRPPTPAPTIASQPLSLRPEACRPAAGGAVHTR |
| | 126165) | GLDFACDIYIWAPLAGTCGVLLLSLVITLYCKRGRKKLLYIFKQPFMRPVQTTQEEDGCS |
| | | CRFPEEEEGGCELRVKFSRSADAPAYKQGQNQLYNELNLGRREEYDVLDKRRGRDPEMGG |
| | | KPRRKNPQEGLYNELQKDKMAEAYSEIGMKGERRRGKGHDGLYQGLSTATKDTYDALHMQ |
| | | ALPPR |
| 441 | M6 (ScFv | QVQLVQSGAEVKKPGASVKVSCKASGYTFTSYYMHWVRQ |
| | domain) | APGQGLEWMGIINPSGGSTSYAQKFQGRVTMTRDTSTSTVYMELSSLRSEDTAVYYCARY |
| | | [chemical structure] |
| | | SVGDRVTITCRASQGVGRWLAWYQQKPGTAPKLLIYAASTLQSGVPSRFSGSGSGTDFTL |
| | | TINNLQPEDFATYYCQQANSFPLTFGGGTRLEIK |
| 442 | M6 | MALPVTALLLPLALLLHAARPOVOLQQSGAEVKKPGASVKVSCKASGYTFTGYYMHWVRQ |
| | >FE10- | APGQGLEWMGIINPNSGGTNYAQKFQGRVTMTRDTSISTAYMELSRLRSEDTAVYYCARY |
| | 06ID (M6 46FE10- | [chemical structure] |
| | 06ID | SVGDRVTITCRASQGVGRWLAWYQQKPGTAPKLLIYAASTLQSGVPSRFSGSGSGTDFTL |
| | R001-A4 | TINNLQPEDFATYYCQQANSFPLTFGGGTRLEIKTTTPAPRPPTPAPTIASQPLSLRPEA |
| | 126166) | CRPAAGGAVHTRGLDFACDIYIWAPLAGTCGVLLLSLVITLYCKRGRKKLLYIFKQPFMR |
| | | PVQTTQEEDGCSCRFPEEEEGGCELRVKFSRSADAPAYKQGQNQLYNELNLGRREEYDVL |
| | | DKRRGRDPEMGGKPRRKNPQEGLYNELQKDKMAEAYSEIGMKGERRRGKGHDGLYQGLST |
| | | ATKDTYDALHMQALPPR |
| 443 | M7 (ScFv | QVQLVQSGGGWQPGRSLRLSCAASGFTFSSYAMHWVRQ |
| | domain) | APGKGLEWVAVISYDGSNKYYADSVKGRFTISRDNSKNTLYLQMNSLRAEDTAVYYCARW |
| | | [chemical structure] |
| | | AILSCRASQSVYTKYLGWYQQKPGQAPRLLIYDASTRATGIPDRFSGSGSGTDFTLTINR |
| | | LEPEDFAVYYCQHYGGSPLITFGQGTRLEIK |
| 444 | M7 | MALPVTALLLPLALLLHAARPOVOLQQSGAEVKKPGASVKVSCKASGYTFTGYYMHWVRQ |
| | >VE12- | APGKGLEWVAVISYDGSNKYYADSVKGRFTISRDNSKNTLYLQMNSLRAEDTAVYYCARW |
| | 01CD (M7 VE12- | [chemical structure] |
| | 01CD | AILSCRASQSVYTKYLGWYQQKPGQAPRLLIYDASTRATGIPDRFSGSGSGTDFTLTINR |
| | R001-A5 | LEPEDFAVYYCQHYGGSPLITFGQGTRLEIKTTTPAPRPPTPAPTIASQPLSLRPEACRP |
| | 126167) | AAGGAVHTRGLDFACDIYIWAPLAGTCGVLLLSLVITLYCKRGRKKLLYIFKQPFMRPVQ |
| | | TTQEEDGCSCRFPEEEEGGCELRVKFSRSADAPAYKQGQNQLYNELNLGRREEYDVLDKR |
| | | RGRDPEMGGKPRRKNPQEGLYNELQKDKMAEAYSEIGMKGERRRGKGHDGLYQGLSTATK |
| | | DTYDALHMQALPPR |
| 445 | M8 (ScFv | QVQLQQSAEVKKPGASVKVSCKTSGYPFTGYSLHWVRQ |
| | domain) | APGQGLEWMGWINPNSGGTNYAQKFQGRVTMTRDTSISTAYMELSRLRSDDTAVYYCARD |
| | | [chemical structure] |
| | | ITCRASQDSGTWLAWYQQKPGKAPNLLMYDASTLEDGVPSRFSGSASGTEFTLTVNRLQP |
| | | EDSATYYCQQYNSYPLTFGGGTKVDIK |
| 446 | M8 | MALPVTALLLPLALLLHAARPOVOLQQSGAEVKKPGASVKVSCKASGYTFTGYYMHWVRQ |
| | >LE13- | APGQGLEWMGWINPNSGGTNYAQKFQGRVTMTRDTSISTAYMELSRLRSDDTAVYYCARD |
| | 05XD (M8 LE13- | [chemical structure] |
| | 05XD | ITCRASQDSGTWLAWYQQKPGKAPNLLMYDASTLEDGVPSRFSGSASGTEFTLTVNRLQP |
| | R001-E5 | EDSATYYCQQYNSYPLTFGGGTKVDIKTTTPAPRPPTPAPTIASQPLSLRPEACRPAAGG |
| | 126168) | AVHTRGLDFACDIYIWAPLAGTCGVLLLSLVITLYCKRGRKKLLYIFKQPFMRPVQTTQE |
| | | EDGCSCRFPEEEEGGCELRVKFSRSADAPAYKQGQNQLYNELNLGRREEYDVLDKRRGRD |
| | | PEMGGKPRRKNPQEGLYNELQKDKMAEAYSEIGMKGERRRGKGHDGLYQGLSTATKDTYD |
| | | ALHMQALPPR |
| 447 | M9 (ScFv | QVQLVQSGAEVKKPGASVEVSCKASGYTFTSYYMHWVRQ |
| | domain) | APGQGLEWMGIINPSGGSTGYAQKFQGRVTMTRDTSTSTVHMELSSLRSEDTAVYYCARG |
| | | [chemical structure] |
| | | VTITCRASQDISSALAWYQQKPGTPPKLLIYDASSLESGVPSRFSGSGSGTDFTLTISSL |
| | | QPEDFATYYCQQFSSYPLTFGGGTRLEIK |
| 448 | M9 | MALPVTALLLPLALLLHAARPOVOLQQSGAEVKKPGASVKVSCKASGYTFTGYYMHWVRQ |
| | >BE15- | APGQGLEWMGIINPSGGSTGYAQKFQGRVTMTRDTSTSTVHMELSSLRSEDTAVYYCARG |
| | 00SD (M9 BE15- | [chemical structure] |
| | 00SD | VTITCRASQDISSALAWYQQKPGTPPKLLIYDASSLESGVPSRFSGSGSGTDFTLTISSL |
| | R001-A3 | QPEDFATYYCQQFSSYPLTFGGGTRLEIKTTTPAPRPPTPAPTIASQPLSLRPEACRPAA |
| | 126169) | GGAVHTRGLDFACDIYIWAPLAGTCGVLLLSLVITLYCKRGRKKLLYIFKQPFMRPVQTT |
| | | QEEDGCSCRFPEEEEGGCELRVKFSRSADAPAYKQGQNQLYNELNLGRREEYDVLDKRRG |
| | | RDPEMGGKPRRKNPQEGLYNELQKDKMAEAYSEIGMKGERRRGKGHDGLYQGLSTATKDT |
| | | YDALHMQALPPR |
| 449 | M10 (ScFv | QVQLVQSGAEVKKPGASVKVSCKASGYTFTSYGISWVRQ |
| | domain) | APGQGLEWMGWISAYNGNTNYAQKLQGRVTMTTDTSTSTAYMELRSLRSDDTAVYYCARV |
| | | [chemical structure] |
| | | RATISCKSSHSVLYNRNNKNYLAWYQQKPGQPPKLLFYWASTRKSGVPDRFSGSGSGTDF |
| | | TLTISSLQPEDFATYFCQQTQTFPLTFGQGTRLEIN |
| 450 | M10 | MALPVTALLLPLALLLHAARPOVOLQQSGAEVKKPGASVKVSCKASGYTFTGYYMHWVRQ |
| | >RE16- | APGQGLEWMGWISAYNGNTNYAQKLQGRVTMTTDTSTSTAYMELRSLRSDDTAVYYCARV |
| | 05MD (M10 RE16- | [chemical structure] |
| | 05MD | RATISCKSSHSVLYNRNNKNYLAWYQQKPGQPPKLLFYWASTRKSGVPDRFSGSGSGTDF |
| | R01-D10 | TLTISSLQPEDFATYFCQQTQTFPLTFGQGTRLEINTTTPAPRPPTPAPTIASQPLSLRP |
| | 126170) | EACRPAAGGAVHTRGLDFACDIYIWAPLAGTCGVLLLSLVITLYCKRGRKKLLYIFKQPF |
| | | MRPVQTTQEEDGCSCRFPEEEEGGCELRVKFSRSADAPAYKQGQNQLYNELNLGRREEYD |
| | | VLDKRRGRDPEMGGKPRRKNPQEGLYNELQKDKMAEAYSEIGMKGERRRGKGHDGLYQGL |
| | | STATKDTYDALHMQALPPR |
| 451 | M11 (ScFv | QVQLQQSGAEVKKPGASVKVSCKASGYTFTGYYMHWVRQ |
| | domain) | APGQGLEWMGWINPNSGGTNYAQNFQGRVTMTRDTSISTAYMELRRLRSDDTAVYYCASG |
| | | [chemical structure] |
| | | ASQSIRYYLSWYQQKPGKAPKLLIYTASILQNGVPSRFSGSGSGTDFTLTISSLQPEDFA |
| | | TYYCLQTYTTPDFGPGTKVEIK |
| 452 | M11 | MALPVTALLLPLALLLHAARPOVOLQQSGAEVKKPGASVKVSCKASGYTFTGYYMHWVRQ |
| | >NE10- | APGQGLEWMGWINPNSGGTNYAQNFQGRVTMTRDTSISTAYMELRRLRSDDTAVYYCASG |
| | 19WD (M11 NE10- | [chemical structure] |
| | 19WD | ASQSIRYYLSWYQQKPGKAPKLLIYTASILQNGVPSRFSGSGSGTDFTLTISSLQPEDFA |
| | R001-G2 | TYYCLQTYTTPDFGPGTKVEIKTTTPAPRPPTPAPTIASQPLSLRPEACRPAAGGAVHTR |
| | 126171) | GLDFACDIYIWAPLAGTCGVLLLSLVITLYCKRGRKKLLYIFKQPFMRPVQTTQEEDGCS |
| | | CRFPEEEEGGCELRVKFSRSADAPAYKQGQNQLYNELNLGRREEYDVLDKRRGRDPEMGG |
| | | KPRRKNPQEGLYNELQKDKMAEAYSEIGMKGERRRGKGHDGLYQGLSTATKDTYDALHMQ |
| | | ALPPR |
| 453 | M12 (ScFv | QVQLVQSGAEVKKPGASVKVSCKASGYTFTGYYMHWVRQ |
| | domain) | APGQGLEWMGRINPNSGGTNYAQKFQGRVTMTTDTSTSTAYMELRSLRSDDTAVYYCART |
| | | [chemical structure] |
| | | TCRASQSISTWLAWYQQKPGKAPNLLIYKASTLESGVPSRFSGSGSGTEFTLTISSLQPD |
| | | DFATYYCQQYNTYSPYTFGQGTKLEIK |
| 454 | M12 | MALPVTALLLPLALLLHAARPOVOLQQSGAEVKKPGASVKVSCKASGYTFTGYYMHWVRQ |
| | >DE12- | APGQGLEWMGRINPNSGGTNYAQKFQGRVTMTTDTSTSTAYMELRSLRSDDTAVYYCART |
| | 14RD (M12 DE12- | [chemical structure] |
| | 14RD | TCRASQSISTWLAWYQQKPGKAPNLLIYKASTLESGVPSRFSGSGSGTEFTLTISSLQPD |
| | R001-G9 | DFATYYCQQYKTYSPYTFGQGTKLEIKTTTPAPRPPTPAPTIASQPLSLRPEACRPAAGG |
| | 126172) | AVHTRGLDFACDIYIWAPLAGTCGVLLLSLVITLYCKRGRKKLLYIFKQPFMRPVQTTQE |
| | | EDGCSCRFPEEEEGGCELRVKFSRSADAPAYKQGQNQLYNELNLGRREEYDVLDKRRGRD |
| | | PEMGGKPRRKNPQEGLYNELQKDKMAEAYSEIGMKGERRRGKGHDGLYQGLSTATKDTYD |
| | | ALHMQALPPR |
| 455 | M13 (ScFv | QVQLVQSGGGLVKPGGSLRLSCEASGFIFSDYYMGWIRQ |
| | domain) | APGKGLEWVSYIGRSGSSMYYAPSVKGRFTFSRDNAKNSLYLQMNSLRAEDTAVYYCAAS |
| | | [chemical structure] |
| | | ATLSCRASQSVTSNYLAWYQQKPGQAPRLLLFGASTRATGIPDRFSGSGSGTDFTLTINR |
| | | LEPEDFAMYYCQQYGSAPVTFGQGTKLEIK |
| 456 | M13 | MALPVTALLLPLALLLHAARPOVOLQQSGAEVKKPGASVKVSCKASGYTFTGYYMHWVRQ |
| | >TE13- | APGKGLEWVSYIGRSGSSMYYAPSVKGRFTFSRDNAKNSLYLQMNSLRAEDTAVYYCAAS |
| | 19LD (M13 TE13- | [chemical structure] |
| | 19LD | ATLSCRASQSVTSNYLAWYQQKPGQAPRLLLFGASTRATGIPDRFSGSGSGTDFTLTINR |
| | R002-C3 | LEPEDFAMYYCQQYGSAPVTFGQGTKLEIKTTTPAPRPPTPAPTIASQPLSLRPEACRPA |
| | 126173) | AGGAVHTRGLDFACDIYIWAPLAGTCGVLLLSLVITLYCKRGRKKLLYIFKQPFMRPVQT |
| | | TQEEDGCSCRFPEEEEGGCELRVKFSRSADAPAYKQGQNQLYNELNLGRREEYDVLDKRR |
| | | GRDPEMGGKPRRKNPQEGLYNELQKDKMAEAYSEIGMKGERRRGKGHDGLYQGLSTATKD |
| | | TYDALHMQALPPR |
| 457 | M14 (ScFv | QVQLVQSGAEVRAPGASVKISCKASGFTFRGYYIHWVRQ |
| | domain) | APGQGLEWMGIINPSGGSRAYAQKFQGRVTMTRDTSTSTVYMELSSLRSDDTAMYYCART |
| | | [chemical structure] |
| | | RVTITCRASENVNIWLAWYQQKPGKAPKLLIYKSSSLASGVPSRFSGSGSGAEFTLTISS |
| | | LQPDDFATYYCQQYQSYPLTFGGGTKVDIK |
| 458 | M14 | MALPVTALLLPLALLLHAARPOVOLQQSGAEVKKPGASVKVSCKASGYTFTGYYMHWVRQ |
| | >BS83- | APGQGLEWMGIINPSGGSRAYAQKFQGRVTMTRDTSTSTVYMELSSLRSDDTAMYYCART |
| | 95ID (M14 BS83- | [chemical structure] |
| | 95ID | RVTITCRASENVNIWLAWYQQKPGKAPKLLIYKSSSLASGVPSRFSGSGSGAEFTLTISS |
| | R001-E8 | LQPDDFATYYCQQYQSYPLTFGGGTKVDIKTTTPAPRPPTPAPTIASQPLSLRPEACRPA |
| | 126174) | AGGAVHTRGLDFACDIYIWAPLAGTCGVLLLSLVITLYCKRGRKKLLYIFKQPFMRPVQT |
| | | TQEEDGCSCRFPEEEEGGCELRVKFSRSADAPAYKQGQNQLYNELNLGRREEYDVLDKRR |
| | | GRDPEMGGKPRRKNPQEGLYNELQKDKMAEAYSEIGMKGERRRGKGHDGLYQGLSTATKD |
| | | TYDALHMQALPPR |
| 459 | M15 (ScFv | QVQLVQSGGGLVQPGRSLRLSCAASGFTFDDYAMHWVRQ |
| | domain) | APGKGLEWVSGISWNSGSIGYADSVKGRFTISRDNAKNSLYLQMNSLRAEDTAVYYCAKD |
| | | [chemical structure] |
| | | QGDALRSYYASWYQQKPGQAPMLVIYGKNNRPSGIPDRFSGSDSGDTASLTITGAQAEDE |
| | | ADYYCNSRDSSGYPVFGTGTKVTVL |
| 460 | M15 | MALPVTALLLPLALLLHAARPOVOLQQSGAEVKKPGASVKVSCKASGYTFTGYYMHWVRQ |
| | >HS86- | APGKGLEWVSGISWNSGSIGYADSVKGRFTISRDNAKNSLYLQMNSLRAEDTAVYYCAKD |
| | 94XD (M15 HS86- | [chemical structure] |
| | 94XD | QGDALRSYYASWYQQKPGQAPMLVTYGKNNRPSGIPDRFSGSDSGDTASLTITGAQAEDE |
| | NT | ADYYCNSRDSSGYPVFGTGTKVTVLTTTPAPRPPTPAPTIASQPLSLRPEACRPAAGGAV |
| | 127553) | HTRGLDFACDIYIWAPLAGTCGVLLLSLVITLYCKRGRKKLLYIFKQPFMRPVQTTQEED |
| | | GCSCRFPEEEEGGCELRVKFSRSADAPAYKQGQNQLYNELNLGRREEYDVLDKRRGRDPE |
| | | MGGKPRRKNPQEGLYNELQKDKMAEAYSEIGMKGERRRGKGHDGLYQGLSTATKDTYDAL |
| | | HMQALPPR |
| 461 | M16 (ScFv | EVQLVESGGGLVQPGRSLRLSCAASGFTFDDYAMHWVRQ |
| | domain) | APGKGLEWVSGISWNSGSTGYADSVKGRFTISRDNAKNSLYLQMNSLRAEDTALYYCAKD |
| | | [chemical structure] |
| | | CQGDSLRSYYASWYQQKPGQAPVLVIFGRSRRPSGIPDRFSGSSSGNTASLIITGAQAED |
| | | EADYYCNSRDNTANHYVFGTGTKLTVL |
| 462 | M16 | MALPVTALLLPLALLLHAARPOVOLQQSGAEVKKPGASVKVSCKASGYTFTGYYMHWVRQ |
| | >XS87- | APGKGLEWVSGISWNSGSTGYADSVKGRFTISRDNAKNSLYLQMNSLRAEDTALYYCAKD |
| | 99RD (M16 XS87- | [chemical structure] |
| | 99RD | CQGDSLRSYYASWYQQKPGQAPVLVIFGRSRRPSGIPDRFSGSSSGNTASLIITGAQAED |
| | NT | EADYYCNSRDNTANHYVFGTGTKLTVLTTTPAPRPPTPAPTIASQPLSLRPEACRPAAGG |
| | 127554) | AVHTRGLDFACDIYIWAPLAGTCGVLLLSLVITLYCKRGRKKLLYIFKQPFMRPVQTTQE |
| | | EDGCSCRFPEEEEGGCELRVKFSRSADAPAYKQGQNQLYNELNLGRREEYDVLDKRRGRD |
| | | PEMGGKPRRKNPQEGLYNELQKDKMAEAYSEIGMKGERRRGKGHDGLYQGLSTATKDTYD |
| | | ALHMQALPPR |
| 463 | M17 (ScFv | EVQLVESGGGLVQPGRSLRLSCAASGFTFDDYAMHWVRQ |
| | domain) | APGKGLEWVSGISWNSGSTGYADSVKGRFTISRDNAKNSLYLQMNSLRAEDTALYYCAKD |
| | | [chemical structure] |
| | | CQGDSLRSYYASWYQQKPGQAPVLVIYGKNNRPSGIPDRFSGSSSGNTASLTITGAQAED |
| | | EADYYCNSRGSSGNHYVFGTGTKVTVL |
| 464 | M17 | MALPVTALLLPLALLLHAARPOVOLQQSGAEVKKPGASVKVSCKASGYTFTGYYMHWVRQ |
| | >NS89- | APGKGLEWVSGISWNSGSTGYADSVKGRFTISRDNAKNSLYLQMNSLRAEDTALYYCAKD |
| | 94MD (M17 NS89- | [chemical structure] |
| | 94MD | CQGDSLRSYYASWYQQKPGQAPVLVIYGKNNRPSGIPDRFSGSSSGNTASLTITGAQAED |
| | NT | EADYYCNSRGSSGNHYVFGTGTKVTVLTTTPAPRPPTPAPTIASQPLSLRPEACRPAAGG |
| | 127555) | AVHTRGLDFACDIYIWAPLAGTCGVLLLSLVITLYCKRGRKKLLYIFKQPFMRPVQTTQE |
| | | EDGCSCRFPEEEEGGCELRVKFSRSADAFAYKQGQNQLYNELNLGRREEYDVLDKRRGRD |
| | | PEMGGKPRRKNPQEGLYNELQKDKMAEAYSEIGMKGERRRGKGHDGLYQGLSTATKDTYD |
| | | ALHMQALPPR |
| 465 | M18 (ScFv | QVQLVQSGGGLVQPGGSLRLSCAASGFTFSSYWMHWVRQ |
| | domain) | APGKGLVWVSRINSDGSSTSYADSVKGRFTISRDNAKNTLYLQMNSLRAEDTAVYYCVRT |
| | | [chemical structure] |
| | | RATLSCRASQSVSSNYLAWYQQKPGQPPRLLIYDVSTRATGIPARFSGGGSGTDFTLTIS |
| | | SLEPEDFAVYYCQQRSNWPPWTFGQGTKVEIK |
| 466 | M18 | MALPVTALLLPLALLLHAARPOVOLQQSGAEVKKPGASVKVSCKASGYTFTGYYMHWVRQ |
| | >DS90- | APGKGLVWVSRINSDGSSTSYADSVKGRFTISRDNAKNTLYLQMNSLRAEDTAVYYCVRT |
| | 09HD (M18 DS90- | [chemical structure] |
| | 09HD | RATLSCRASQSVSSNYLAWYQQKPGQPPRLLIYDVSTRATGIPARFSGGGSGTDFTLTIS |
| | R003-A05 | SLEPEDFAVYYCQQRSNWPPWTFGQGTKVEIKTTTPAPRPPTPAPTIASQPLSLRPEACR |
| | 127556) | PAAGGAVHTRGLDFACDIYIWAPLAGTCGVLLLSLVITLYCKRGRKKLLYIFKQPFMRPV |
| | | QTTQEEDGCSCRFPEEEEGGCELRVKFSRSADAPAYKQGQNQLYNELNLGRREEYDVLDK |
| | | RRGRDPEMGGKPRRKNPQEGLYNELQKDKMAEAYSEIGMKGERRRGKGHDGLYQGLSTAT |
| | | KDTYDALHMQALPPR |
| 467 | M19 (ScFv | QVQLVQSGGGVVQPGRSLRLSCAASGFTFSSYGMHWVRQ |
| | domain) | APGKGLEWVAVISYDGSNKYYADSVKGRFTISRDNSKNTLYLQMNSLRAEDTAVYYCAKG |
| | | [chemical structure] |
| | | AILSCRASQSVYTKYLGWYQQKPGQAPRLLIYDASTRATGIPDRFSGSGSGTDFTLTINR |
| | | LEPEDFAVYYCQHYGGSPLITFGQGTKVDIK |
| 468 | M19 | MALPVTALLLPLALLLHAARPOVOLQQSGAEVKKPGASVKVSCKASGYTFTGYYMHWVRQ |
| | >TS92- | APGKGLEWVAVISYDGSNKYYADSVKGRFTISRDNSKNTLYLQMNSLRAEDTAVYYCAKG |
| | 04BD (M19 TS92- | [chemical structure] |
| | 04BD | AILSCRASQSVYTKYLGWYQQKPGQAPRLLIYDASTRATGIPDRFSGSGSGTDFTLTINR |
| | R003-C06 | LEPEDFAVYYCQHYGGSPLITFGQGTKVDIKTTTPAPRPPTPAPTIASQPLSLRPEACRP |
| | 127557) | AAGGAVHTRGLDFACDIYIWAPLAGTCGVLLLSLVITLYCKRGRKKLLYIFKQPFMRPVQ |
| | | TTQEEDGCSCRFPEEEEGGCELRVKFSRSADAPAYKQGQNQLYNELNLGRREEYDVLDKR |
| | | RGRDPEMGGKPRRKNPQEGLYNELQKDKMAEAYSEIGMKGERRRGKGHDGLYQGLSTATK |
| | | DTYDALHMQALPPR |
| 469 | M20 (ScFv | QVQLVQSGGGLVQPGGSLRLSCAASGFTFSSYAMSWVRQ |
| | domain) | APGKGLEWVSAISGSGGSTYYADSVKGRFTISRDNSKNTLYLQMNSLRAEDTAVYYCAKR |
| | | [chemical structure] |
| | | RVTITCRASQSISSYLNWYQQKPGKAPKLLIYAASSLQSGVPSRFSGSGSGTDFTLTISS |
| | | LQPEDFATYYCQQSYSIPLTFGQGTKVEIK |
| 470 | M20 | MALPVTALLLPLALLLHAARPOVOLQQSGAEVKKPGASVKVSCKASGYTFTGYYMHWVRQ |
| | >JS93- | APGKGLEWVSAISGSGGSTYYADSVKGRFTISRDNSKNTLYLQMNSLRAEDTAVYYCAKR |
| | 08WD (M20 JS93- | [chemical structure] |
| | 08WD | RVTITCRASQSISSYLNWYQQKPGKAPKLLIYAASSLQSGVPSRFSGSGSGTDFTLTISS |
| | R003-E07 | LQPEDFATYYCQQSYSIPLTFGQGTKVEIKTTTPAPRPPTPAPTIASQPLSLRPEACRPA |
| | 127558) | AGGAVHTRGLDFACDIYIWAPLAGTCGVLLLSLVITLYCKRGRKKLLYIFKQPFMRPVQT |
| | | TQEEDGCSCRFPEEEEGGCELRVKFSRSADAPAYKQGQNQLYNELNLGRREEYDVLDKRR |
| | | GRDPEMGGKPRRKNPQEGLYNELQKDKMAEAYSEIGMKGERRRGKGHDGLYQGLSTATKD |
| | | TYDALHMQALPPR |
| 471 | Ss1 (scFv | QVQLQQSGPELEKPGASVKISCKASGYSFTGYTMNWVKQSHGKSLEWIGLITPYNGASS |
| | domain | YNQKFRGKATLTVDKSSSTAYMDLLSLTSEDSAVYFCARGGYDGRGFDYWGQGTTVTVS |
| | | SGGGGSGGGGSGGGGSDIELTQSPAIMSASPGEKVTMTCSASSSVSYMHWYQQKSGTSP |
| | | KRWIYDTSKLASGVPGRFSGSGSGNSYSLTISSVEAEDDATYYCQQWSGYPLTFGAGTK |
| | | LEI |
| 472 | Ss1 (full) | [chemical structure] |
| | | CSASSSVSYMHWYQQKSGTSPKRWIYDTSKLASGVPGRFSGSGSGNSYSLTISSVEAED |
| | | DATYYCQQWSGYPLTFGAGTKLEITTTPAPRPPTPAPTIASQPLSLRPEACRPAAGGAV |
| | | HTRGLDFACDIYIWAPLAGTCGVLLLSLVITLYCKRGRKKLLYIFKQPFMRPVQTTQEE |
| | | DGCSCRFPEEEEGGCELRVKFSRSADAPA |

TABLE 3
Nucleic Acid Sequences encoding CAR molecules (underlined is the leader
sequence)

| SEQ | | |
|---|---|---|
| ID | | |
| NO: | Desc. | Nucleic Acid Sequence |
| 473 | M1 | CAAGTCCAACTGCAGCAGTCAGGAGCGGAAGTGAAGAAACCAGGAGCGTCAGTCAAAGTGTCGTGCAAGGCTAGCGGCTA |
| | (ScFv | CACCTTCACCGGCTACTA |
| | domain) | CATGCACTGGGTTCGACAGGCTCCAGGGCAGGGTCTGGAGTGGATGGGCCGCATCAACCCGAATTCCGGTGGGACTAACT |
| | >ZA53- | ACGCCCAGAAGTTCCAGGGAAGAGTGACCATGACTAGGGACACGTCGATCAGCACTGCGTACATGGAACTGAGCCGCCTG |
| | 27BC | CGGTCCGAGGATACTGCCGTCTACTACTGCGCACGCGGAAGGTACTATGGAATGGACGTGTGGGGCCAAGGGACTATGGT |
| | (M1) | GACTGTGAGCTCGGGAGGGGGAGGCTCCGGTGGCGGGGGATCAGGAGGAGGAGGATCAGGGGGAGGAGGTTCCGAAATTG |
| | | TCCTCACCCAGAGCCCGGCAACCCTCTCACTTTCCCCGGGAGAGCGCGCAACCATCTCTTGCCGGGCTAGCCAATCCGTG |
| | | TCGTCCAATTTCGCCTGGTACCAGCAACGGCCGGGACAAGCCCCTAGACTCCTGATCTACGACGCCAGCAACAGAGCGAC |
| | | TGGAATTCCTCCACGCTTTTCGGGATCAGGCTCCGGTACCGACTTCACCCTGACTATCTCGTCGCTCGAACCCGAGGATT |
| | | TCGCCGCCTACTACTGTCATCAGCGGTCGAACTGGTTGTATACGTTTGGCCAGGGCACCAAGGTGGATATCAAG |
| 474 | M1 | ATGGCCCTCCCTGTCACCGCCCTGCTGCTTCCGCTGGCTCTTCTGCTCCACGCCGCTCGGCCCCAAGTCCAACTGCAGCA |
| | (Full) | G |
| | >ZA53- | TCAGGAGCGGAAGTGAAGAAACCAGGAGCGTCAGTCAAAGTGTCGTGCAAGGCTAGCGGCTACACCTTCACCGGCTACTA |
| | 27BC | CATGCACTGGGTTCGACAGGCTCCAGGGCAGGGTCTGGAGTGGATGGGCCGCATCAACCCGAATTCCGGTGGGACTAACT |
| | (M1) | ACGCCCAGAAGTTCCAGGGAAGAGTGACCATGACTAGGGACACGTCGATCAGCACTGCGTACATGGAACTGAGCCGCCTG |
| | | CGGTCCGAGGATACTGCCGTCTACTACTGCGCACGCGGAAGGTACTATGGAATGGACGTGTGGGGCCAAGGGACTATGGT |
| | | GACTGTGAGCTCGGGAGGGGGAGGCTCCGGTGGCGGGGGATCAGGAGGAGGAGGATCAGGGGGAGGAGGTTCCGAAATTG |
| | | TCCTCACCCAGAGCCCGGCAACCCTCTCACTTTCCCCGGGAGAGCGCGCAACCATCTCTTGCCGGGCTAGCCAATCCGTG |
| | | TCGTCCAATTTCGCCTGGTACCAGCAACGGCCGGGACAAGCCCCTAGACTCCTGATCTACGACGCCAGCAACAGAGCGAC |
| | | TGGAATTCCTCCACGCTTTTCGGGATCAGGCTCCGGTACCGACTTCACCCTGACTATCTCGTCGCTCGAACCCGAGGATT |
| | | TCGCCGCCTACTACTGTCATCAGCGGTCGAACTGGTTGTATACGTTTGGCCAGGGCACCAAGGTGGATATCAAGACCACT |
| | | ACCCCAGCACCGAGGCCACCCACCCCGGCTCCTACCATCGCCTCCCAGCCTCTGTCCCTGCGTCCGGAGGCATGTAGACC |
| | | CGCAGCTGGTGGGGCCGTGCATACCCGGGGTCTTGACTTCGCCTGCGATATCTACATTTGGGCCCCTCTGGCTGGTACTT |
| | | GCGGGGTCCTGCTGCTTTCACTCGTGATCACTCTTTACTGTAAGCGCGGTCGGAAGAAGCTGCTGTACATCTTTAAGCAA |
| | | CCCTTCATGAGGCCTGTGCAGACTACTCAAGAGGAGGACGGCTGTTCATGCCGGTTCCCAGAGGAGGAGGAAGGCGGCTG |
| | | CGAACTGCGCGTGAAATTCAGCCGCAGCGCAGATGCTCCAGCCTACAAGCAGGGGCAGAACCAGCTCTACAACGAACTCA |
| | | ATCTTGGTCGGAGAGAGGAGTACGACGTGCTGGACAAGCGGAGAGGACGGGACCCAGAAATGGGCGGGAAGCCGCGCAGA |
| | | AAGAATCCCCAAGAGGGCCTGTACAACGAGCTCCAAAAGGATAAGATGGCAGAAGCCTATAGCGAGATTGGTATGAAAGG |
| | | GGAACGCAGAAGAGGCAAAGGCCACGACGGACTGTACCAGGGACTCAGCACCGCCACCAAGGACACCTATGACGCTCTTC |
| | | ACATGCAGGCCCTGCCGCCTCGG |
| 475 | M2 | CAAGTCCAACTCGTCCAGTCAGGAGCAGAAGTCAAGAAACCAGGTGCTAGCGTGAAAGTGTCGTGCAAGGCGTCGGGATA |
| | (ScFv | CACTTTCACCGGATACTAC |
| | domain) | ATGCACTGGGTCCGCCAGGCCCCCGGACAAGGACTGGAATGGATGGGCTGGATCAACCCGAATAGCGGGGGAACTAATTA |
| | >FA56- | CGCCCAGAAGTTTCAGGGACGAGTGACCATGACCCGCGATACCTCTATCTCGACCGCCTACATGGAGCTCTCCAGACTGC |
| | 26RC | GCTCCGACGATACTGCAGTGTACTACTGCGCCCGGGACCTGAGGCGGACTGTGGTTACTCCTCGCGCCTATTATGGCATG |
| | (M2) | GACGTGTGGGGCCAAGGAACTACTGTGACTGTGAGCTCGGGAGGCGGTGGGTCAGGCGGAGGAGGGTCGGGCGGTGGTGG |
| | | CTCGGGAGGGGGAGGAAGCGACATTCAACTTACGCAGAGCCCGTCAACCCTGTCAGCGTCAGTGGGAGATCGGGTGACCA |
| | | TCACGTGTCAGGCCAGCCAGGATATCTCCAACTCGCTCAACTGGTACCAGCAAAAGGCGGGTAAAGCTCCGAAGCTGCTG |
| | | ATCTACGACGCTTCCACCCTCGAGACTGGAGTCCCATCCAGATTTTCCGGGTCAGGAAGCGGCACCGATTTCTCCTTCAC |
| | | CATTTCGTCCTTGCAACCGGAGGACATCGCAACCTACTACTGCCAGCAGCATGACAACTTGCCTCTGACGTTCGGGCAGG |
| | | GCACCAAGGTGGAAATCAAG |
| 476 | M2 | ATGGCCCTCCCTGTCACCGCCCTGCTGCTTCCGCTGGCTCTTCTGCTCCACGCCGCTCGGCCCCAAGTCCAACTCGTCCA |
| | (Full) | GTCAGGAGCAGAAGTCAAGAAACCAGGTGCTAGCGTGAAAGTGTCGTGCAAGGCGTCGGGATACACTTTCACCGGATACT |
| | >FA56- | AC |
| | 26RC | ATGCACTGGGTCCGCCAGGCCCCCGGACAAGGACTGGAATGGATGGGCTGGATCAACCCGAATAGCGGGGGAACTAATTA |
| | (M2) | CGCCCAGAAGTTTCAGGGACGAGTGACCATGACCCGCGATACCTCTATCTCGACCGCCTACATGGAGCTCTCCAGACTGC |
| | | GCTCCGACGATACTGCAGTGTACTACTGCGCCCGGGACCTGAGGCGGACTGTGGTTACTCCTCGCGCCTATTATGGCATG |
| | | GACGTGTGGGGCCAAGGAACTACTGTGACTGTGAGCTCGGGAGGCGGTGGGTCAGGCGGAGGAGGGTCGGGCGGTGGTGG |
| | | CTCGGGAGGGGGAGGAAGCGACATTCAACTTACGCAGAGCCCGTCAACCCTGTCAGCGTCAGTGGGAGATCGGGTGACCA |
| | | TCACGTGTCAGGCCAGCCAGGATATCTCCAACTCGCTCAACTGGTACCAGCAAAAGGCGGGTAAAGCTCCGAAGCTGCTG |
| | | ATCTACGACGCTTCCACCCTCGAGACTGGAGTCCCATCCAGATTTTCCGGGTCAGGAAGCGGCACCGATTTCTCCTTCAC |
| | | CATTTCGTCCTTGCAACCGGAGGACATCGCAACCTACTACTGCCAGCAGCATGACAACTTGCCTCTGACGTTCGGGCAGG |
| | | GCACCAAGGTGGAAATCAAGACCACTACCCCAGCACCGAGGCCACCCACCCCGGCTCCTACCATCGCCTCCCAGCCTCTG |
| | | TCCCTGCGTCCGGAGGCATGTAGACCCGCAGCTGGTGGGGCCGTGCATACCCGGGGTCTTGACTTCGCCTGCGATATCTA |
| | | CATTTGGGCCCCTCTGGCTGGTACTTGCGGGGTCCTGCTGCTTTCACTCGTGATCACTCTTTACTGTAAGCGCGGTCGGA |
| | | AGAAGCTGCTGTACATCTTTAAGCAACCCTTCATGAGGCCTGTGCAGACTACTCAAGAGGAGGACGGCTGTTCATGCCGG |
| | | TTCCCAGAGGAGGAGGAAGGCGGCTGCGAACTGCGCGTGAAATTCAGCCGCAGCGCAGATGCTCCAGCCTACAAGCAGGG |
| | | GCAGAACCAGCTCTACAACGAACTCAATCTTGGTCGGAGAGAGGAGTACGACGTGCTGGACAAGCGGAGAGGACGGGACC |
| | | CAGAAATGGGCGGGAAGCCGCGCAGAAAGAATCCCCAAGAGGGCCTGTACAACGAGCTCCAAAAGGATAAGATGGCAGAA |
| | | GCCTATAGCGAGATTGGTATGAAAGGGGAACGCAGAAGAGGCAAAGGCCACGACGGACTGTACCAGGGACTCAGCACCGC |
| | | CACCAAGGACACCTATGACGCTCTTCACATGCAGGCCCTGCCGCCTCGG |
| 477 | M3 | CAAGTCCAACTCGTCCAA |
| | (ScFv | TCAGGAGCGGAAGTCAAAAAGCCCGGAGCTCCAGTGAAAGTGTCATGCAAGGCCTCCGGCTACACCTTCACCGGTTACTA |
| | domain) | TATGCACTGGGTGCGGCAGGCCCCGGGCCAGGGGTTGGAATGGATGGGATGGATCAATCCAAACTCGGGTGGGACTAACT |
| | >VA58- | ACGCCCAGAAGTTCCAAGGACGGGTGACCATGACTAGGGACACCTCGATCTCCACCGCATACATGGAGCTTAGCAGACTC |
| | 21LC | CGCTCCGACGATACCGCAGTCTACTATTGCGCGCGGGGAGAGTGGGACGGATCGTACTACTACGATTACTGGGGCCAGGG |
| | (M3) | AACTCTGGTGACTGTTTCCTCGGGTGGAGGAGGTTCAGGCGGAGGCGGCTCGGGCGGGGGAGGATCTGGAGGAGGAGGGT |
| | | CCGACATTGTGCTGACCCAAACTCCTTCGTCCCTGTCGGCCAGCGTGGGCGACCGCGTGACGATTACGTGCAGAGCTAGC |
| | | CAATCCATCAATACTTACCTCAACTGGTACCAGCATAAGCCGGGGAAAGCACCAAAGCTGCTGATCTACGCCGCCTCATC |
| | | CTTGCAGAGCGGTGTGCCTTCACGCTTTAGCGGATCGGGATCGGGAACGGATTTCACCCTGACTATCAGCTCCCTCCAGC |
| | | CGGAGGATTTTGCGACCTACTACTGTCAGCAGAGCTTCTCACCGCTGACTTTCGGCGGCGGGACCAAGCTGGAAATCAAG |
| 478 | M3 | ATGGCCCTCCCTGTCACCGCCCTGCTGCTTCCGCTGGCTCTTCTGCTCCACGCCGCTCGGCCCCAAGTCCAACTCGTCCA |
| | (Full) | A |
| | >VA58- | TCAGGAGCGGAAGTCAAAAAGCCCGGAGCTCCAGTGAAAGTGTCATGCAAGGCCTCCGGCTACACCTTCACCGGTTACTA |
| | 21LC | TATGCACTGGGTGCGGCAGGCCCCGGGCCAGGGGTTGGAATGGATGGGATGGATCAATCCAAACTCGGGTGGGACTAACT |
| | (M3) | ACGCCCAGAAGTTCCAAGGACGGGTGACCATGACTAGGGACACCTCGATCTCCACCGCATACATGGAGCTTAGCAGACTC |
| | | CGCTCCGACGATACCGCAGTCTACTATTGCGCGCGGGGAGAGTGGGACGGATCGTACTACTACGATTACTGGGGCCAGGG |
| | | AACTCTGGTGACTGTTTCCTCGGGTGGAGGAGGTTCAGGCGGAGGCGGCTCGGGCGGGGGAGGATCTGGAGGAGGAGGGT |
| | | CCGACATTGTGCTGACCCAAACTCCTTCGTCCCTGTCGGCCAGCGTGGGCGACCGCGTGACGATTACGTGCAGAGCTAGC |
| | | CAATCCATCAATACTTACCTCAACTGGTACCAGCATAAGCCGGGGAAAGCACCAAAGCTGCTGATCTACGCCGCCTCATC |
| | | CTTGCAGAGCGGTGTGCCTTCACGCTTTAGCGGATCGGGATCGGGAACGGATTTCACCCTGACTATCAGCTCCCTCCAGC |
| | | CGGAGGATTTTGCGACCTACTACTGTCAGCAGAGCTTCTCACCGCTGACTTTCGGCGGCGGGACCAAGCTGGAAATCAAG |
| | | ACCACTACCCCAGCACCGAGGCCACCCACCCCGGCTCCTACCATCGCCTCCCAGCCTCTGTCCCTGCGTCCGGAGGCATG |
| | | TAGACCCGCAGCTGGTGGGGCCGTGCATACCCGGGGTCTTGACTTCGCCTGCGATATCTACATTTGGGCCCCTCTGGCTG |
| | | GTACTTGCGGGGTCCTGCTGCTTTCACTCGTGATCACTCTTTACTGTAAGCGCGGTCGGAAGAAGCTGCTGTACATCTTT |
| | | AAGCAACCCTTCATGAGGCCTGTGCAGACTACTCAAGAGGAGGACGGCTGTTCATGCCGGTTCCCAGAGGAGGAGGAAGG |
| | | CGGCTGCGAACTGCGCGTGAAATTCAGCCGCAGCGCAGATGCTCCAGCCTACAAGCAGGGGCAGAACCAGCTCTACAACG |
| | | AACTCAATCTTGGTCGGAGAGAGGAGTACGACGTGCTGGACAAGCGGAGAGGACGGGACCCAGAAATGGGCGGGAAGCCG |
| | | CGCAGAAAGAATCCCCAAGAGGGCCTGTACAACGAGCTCCAAAAGGATAAGATGGCAGAAGCCTATAGCGAGATTGGTAT |
| | | GAAAGGGGAACGCAGAAGAGGCAAAGGCCACGACGGACTGTACCAGGGACTCAGCACCGCCACCAAGGACACCTATGACG |
| | | CTCTTCACATGCAGGCCCTGCCGCCTCGG |
| 479 | M4 | CAAGTGCAACTCGTTGAA |
| | (ScFv | TCAGGTGGAGGTTTGGTGCAACCCGGAGGATCTCTCAGACTGTCGTGTGCGGCGTCCGGGTTCACCTTTTCGTCCTACTG |
| | domain) | GATGCACTGGGTGCGCCAGGTGCCGGGAAAAGGACTGGTGTGGGTGTCCAGAATCAACACCGACGGGTCAACGACTACCT |
| | >DP37- | ACGCAGATAGCGTGGAAGGTCGGTTCACCATTTCGCGGGACAACGCTAAAAACACTCTGTACCTTCAGATGAATTCACTG |
| | 07IC | CGCGATGACGACACCGCAGTCTACTACTGCGTCGGTGGACACTGGGCGGTCTGGGGACAGGGAACTACGGTGACTGTGTC |
| | (M4) | CAGCGGCGGGGGAGGAAGCGGCGGAGGGGGGAGCGGAGGCGGAGGATCAGGAGGAGGCGGCTCCGATATCCAGATGACCC |
| | | AGTCGCCATCGACCCTCTCCGCTAGCGTGGGGGATAGGGTCACTATCACTTGCCGAGCCAGCCAATCCATTAGCGACCGG |
| | | CTTGCCTGGTACCAACAGAAACCTGGAAAGGCCCCGAAGCTGCTCATCTACAAGGCCTCGTCACTGGAGTCGGGAGTCCC |
| | | GTCCCGCTTTTCCGGCTCGGGCTCAGGCACCGAGTTCACTCTGACCATCTCGAGCCTGCAGCCGGACGATTTCGCCGTGT |
| | | ATTACTGCCAGCAATACGGACATCTCCCAATGTACACGTTCGGTCAGGGCACCAAGGTCGAAATCAAG |
| 480 | M4 | ATGGCCCTCCCTGTCACCGCCCTGCTGCTTCCGCTGGCTCTTCTGCTCCACGCCGCTCGGCCCCAAGTGCAACTCGTTGA |
| | >DP37- | A |
| | 07IC | TCAGGTGGAGGTTTGGTGCAACCCGGAGGATCTCTCAGACTGTCGTGTGCGGCGTCCGGGTTCACCTTTTCGTCCTACTG |
| | (M4) | GATGCACTGGGTGCGCCAGGTGCCGGGAAAAGGACTGGTGTGGGTGTCCAGAATCAACACCGACGGGTCAACGACTACCT |
| | | ACGCAGATAGCGTGGAAGGTCGGTTCACCATTTCGCGGGACAACGCTAAAAACACTCTGTACCTTCAGATGAATTCACTG |
| | | CGCGATGACGACACCGCAGTCTACTACTGCGTCGGTGGACACTGGGCGGTCTGGGGACAGGGAACTACGGTGACTGTGTC |
| | | CAGCGGCGGGGGAGGAAGCGGCGGAGGGGGGAGCGGAGGCGGAGGATCAGGAGGAGGCGGCTCCGATATCCAGATGACCC |
| | | AGTCGCCATCGACCCTCTCCGCTAGCGTGGGGGATAGGGTCACTATCACTTGCCGAGCCAGCCAATCCATTAGCGACCGG |
| | | CTTGCCTGGTACCAACAGAAACCTGGAAAGGCCCCGAAGCTGCTCATCTACAAGGCCTCGTCACTGGAGTCGGGAGTCCC |
| | | GTCCCGCTTTTCCGGCTCGGGCTCAGGCACCGAGTTCACTCTGACCATCTCGAGCCTGCAGCCGGACGATTTCGCCGTGT |
| | | ATTACTGCCAGCAATACGGACATCTCCCAATGTACACGTTCGGTCAGGGCACCAAGGTCGAAATCAAGACCACTACCCCA |
| | | GCACCGAGGCCACCCACCCCGGCTCCTACCATCGCCTCCCAGCCTCTGTCCCTGCGTCCGGAGGCATGTAGACCCGCAGC |
| | | TGGTGGGGCCGTGCATACCCGGGGTCTTGACTTCGCCTGCGATATCTACATTTGGGCCCCTCTGGCTGGTACTTGCGGGG |
| | | TCCTGCTGCTTTCACTCGTGATCACTCTTTACTGTAAGCGCGGTCGGAAGAAGCTGCTGTACATCTTTAAGCAACCCTTC |
| | | ATGAGGCCTGTGCAGACTACTCAAGAGGAGGACGGCTGTTCATGCCGGTTCCCAGAGGAGGAGGAAGGCGGCTGCGAACT |
| | | GCGCGTGAAATTCAGCCGCAGCGCAGATGCTCCAGCCTACAAGCAGGGGCAGAACCAGCTCTACAACGAACTCAATCTTG |
| | | GTCGGAGAGAGGAGTACGACGTGCTGGACAAGCGGAGAGGACGGGACCCAGAAATGGGCGGGAAGCCGCGCAGAAAGAAT |
| | | CCCCAAGAGGGCCTGTACAACGAGCTCCAAAAGGATAAGATGGCAGAAGCCTATAGCGAGATTGGTATGAAAGGGGAACG |
| | | CAGAAGAGGCAAAGGCCACGACGGACTGTACCAGGGACTCAGCACCGCCACCAAGGACACCTATGACGCTCTTCACATGC |
| | | AGGCCCTGCCGCCTCGG |
| 481 | M5 | CAAGTCCAACTCGTTCAATCAGGCGCAGAAGTCGAAAAGCCCGGAGCATCAGTCAAAGTCTCTTGCAAGGCTTCCGGCTA |
| | (ScFv | CACCTTCACGGACTACTAC |
| | domain) | ATGCACTGGGTGCGCCAGGCTCCAGGCCAGGGACTGGAGTGGATGGGATGGATCAACCCGAATTCCGGGGGAACTAACTA |
| | >XP31- | CGCCCAGAAGTTTCAGGGCCGGGTGACTATGACTCGCGATACCTCGATCTCGACTGCGTACATGGAGCTCAGCCGCCTCC |
| | 20LC | GGTCGGACGATACCGCCGTGTACTATTGTGCGTCGGGATGGGACTTCGACTACTGGGGGCAGGGCACTCTGGTCACTGTG |
| | (M5) | TCAAGCGGAGGAGGTGGATCAGGTGGAGGTGGAAGCGGGGGAGGAGGTTCCGGCGGCGGAGGATCAGATATCGTGATGAC |
| | | GCAATCGCCTTCCTCGTTGTCCGCATCCGTGGGAGACAGGGTGACCATTACTTGCAGAGCGTCCCAGTCCATTCGGTACT |
| | | ACCTGTCGTGGTACCAGCAGAAGCCGGGGAAAGCCCCAAAACTGCTTATCTATACTGCCTCGATCCTCCAAAACGGCGTG |
| | | CCATCAAGATTCAGCGGTTCGGGCAGCGGGACCGACTTTACCCTGACTATCAGCAGCCTGCAGCCGGAAGATTTCGCCAC |
| | | GTACTACTGCCTGCAAACCTACACCACCCCGGACTTCGGACCTGGAACCAAGGTGGAGATCAAG |
| 482 | M5 | ATGGCCCTCCCTGTCACCGCCCTGCTGCTTCCGCTGGCTCTTCTGCTCCACGCCGCTCGGCCCCAAGTCCAACTCGTTCA |
| | (Full) | ATCAGGCGCAGAAGTCGAAAAGCCCGGAGCATCAGTCAAAGTCTCTTGCAAGGCTTCCGGCTACACCTTCACGGACTACT |
| | >XP31- | AC |
| | 20LC | ATGCACTGGGTGCGCCAGGCTCCAGGCCAGGGACTGGAGTGGATGGGATGGATCAACCCGAATTCCGGGGGAACTAACTA |
| | (M5) | CGCCCAGAAGTTTCAGGGCCGGGTGACTATGACTCGCGATACCTCGATCTCGACTGCGTACATGGAGCTCAGCCGCCTCC |
| | | GGTCGGACGATACCGCCGTGTACTATTGTGCGTCGGGATGGGACTTCGACTACTGGGGGCAGGGCACTCTGGTCACTGTG |
| | | TCAAGCGGAGGAGGTGGATCAGGTGGAGGTGGAAGCGGGGGAGGAGGTTCCGGCGGCGGAGGATCAGATATCGTGATGAC |
| | | GCAATCGCCTTCCTCGTTGTCCGCATCCGTGGGAGACAGGGTGACCATTACTTGCAGAGCGTCCCAGTCCATTCGGTACT |
| | | ACCTGTCGTGGTACCAGCAGAAGCCGGGGAAAGCCCCAAAACTGCTTATCTATACTGCCTCGATCCTCCAAAACGGCGTG |
| | | CCATCAAGATTCAGCGGTTCGGGCAGCGGGACCGACTTTACCCTGACTATCAGCAGCCTGCAGCCGGAAGATTTCGCCAC |
| | | GTACTACTGCCTGCAAACCTACACCACCCCGGACTTCGGACCTGGAACCAAGGTGGAGATCAAGACCACXXCCCCAGCAC |
| | | CGAGGCCACCCACCCCGGCTCCTACCATCGCCTCCCAGCCTCTGTCCCTGCGTCCGGAGGCATGTAGACCCGCAGCTGGT |
| | | GGGGCCGTGCATACCCGGGGTCTTGACTTCGCCTGCGATATCTACATTTGGGCCCCTCTGGCTGGTACTTGCGGGGTCCT |
| | | GCTGCTTTCACTCGTGATCACTCTTTACTGTAAGCGCGGTCGGAAGAAGCTGCTGTACATCTTTAAGCAACCCTTCATGA |
| | | GGCCTGTGCAGACTACTCAAGAGGAGGACGGCTGTTCATGCCGGTTCCCAGAGGAGGAGGAAGGCGGCTGCGAACTGCGC |
| | | GTGAAATTCAGCCGCAGCGCAGATGCTCCAGCCTACAAGCAGGGGCAGAACCAGCTCTACAACGAACTCAATCTTGGTCG |
| | | GAGAGAGGAGTACGACGTGCTGGACAAGCGGAGAGGACGGGACCCAGAAATGGGCGGGAAGCCGCGCAGAAAGAATCCCC |
| | | AAGAGGGCCTGTACAACGAGCTCCAAAAGGATAAGATGGCAGAAGCCTATAGCGAGATTGGTATGAAAGGGGAACGCAGA |
| | | AGAGGCAAAGGCCACGACGGACTGTACCAGGGACTCAGCACCGCCACCAAGGACACCTATGACGCTCTTCACATGCAGGC |
| | | CCTGCCGCCTCGG |
| 483 | M6 | CAAGTGCAACTCGTCCAGTCAGGTGCAGAAGTGAAGAAACCCGGAGCGTCAGTCAAAGTGTCATGCAAGGCGTCAGGCTA |
| | (ScFv | CACCTTCACCAGCTACTAC |
| | domain) | ATGCACTGGGTGCGGCAGGCCCCAGGCCAAGGCTTGGAGTGGATGGGAATCATTAACCCGTCAGGAGGCTCCACCTCCTA |
| | >FE10- | CGCCCAGAAGTTTCAGGGAAGAGTGACGATGACTCGGGATACGTCGACCTCGACCGTGTACATGGAACTGAGCTCGCTGC |
| | 06ID | GCTCCGAGGACACTGCTGTGTACTACTGCGCACGGTACAGACTCATTGCCGTGGCAGGAGACTACTACTACTATGGCATG |
| | (M6) | GACGTCTGGGGGCAGGGCACTATGGTCACTGTGTCGTCCGGCGGAGGAGGCTCGGGTGGAGGAGGTAGCGGAGGAGGGGG |
| | | AAGCGGAGGGGGGGGCTCCGATATCCAGATGACTCAGTCGCCTTCCTCCGTGTCGGCCTCGGTTGGAGATCGCGTCACCA |
| | | TCACTTGTCGAGCTTCCCAAGGAGTCGGTAGGTGGCTGGCGTGGTACCAGCAAAAGCCGGGAACTGCCCCGAAGCTCCTG |
| | | ATCTACGCGGCTAGCACCCTGCAGTCGGGAGTGCCATCCCGCTTCAGCGGATCTGGGTCAGGTACCGACTTCACCCTTAC |
| | | GATCAACAATCTCCAGCCGGAGGACTTTGCCACCTATTACTGCCAACAGGCCAACAGCTTCCCTCTGACTTTCGGAGGGG |
| | | GCACTCGCCTGGAAATCAAG |
| 484 | M6 | ATGGCCCTCCCTGTCACCGCCCTGCTGCTTCCGCTGGCTCTTCTGCTCCACGCCGCTCGGCCCCAAGTGCAACTCGTCCA |
| | (Full) | GTCAGGTGCAGAAGTGAAGAAACCCGGAGCGTCAGTCAAAGTGTCATGCAAGGCGTCAGGCTACACCTTCACCAGCTACT |
| | >FE10- | AC |
| | 06ID | ATGCACTGGGTGCGGCAGGCCCCAGGCCAAGGCTTGGAGTGGATGGGAATCATTAACCCGTCAGGAGGCTCCACCTCCTA |
| | (M6) | CGCCCAGAAGTTTCAGGGAAGAGTGACGATGACTCGGGATACGTCGACCTCGACCGTGTACATGGAACTGAGCTCGCTGC |
| | | GCTCCGAGGACACTGCTGTGTACTACTGCGCACGGTACAGACTCATTGCCGTGGCAGGAGACTACTACTACTATGGCATG |
| | | GACGTCTGGGGGCAGGGCACTATGGTCACTGTGTCGTCCGGCGGAGGAGGCTCGGGTGGAGGAGGTAGCGGAGGAGGGGG |
| | | AAGCGGAGGGGGGGGCTCCGATATCCAGATGACTCAGTCGCCTTCCTCCGTGTCGGCCTCGGTTGGAGATCGCGTCACCA |
| | | TCACTTGTCGAGCTTCCCAAGGAGTCGGTAGGTGGCTGGCGTGGTACCAGCAAAAGCCGGGAACTGCCCCGAAGCTCCTG |
| | | ATCTACGCGGCTAGCACCCTGCAGTCGGGAGTGCCATCCCGCTTCAGCGGATCTGGGTCAGGTACCGACTTCACCCTTAC |
| | | GATCAACAATCTCCAGCCGGAGGACTTTGCCACCTATTACTGCCAACAGGCCAACAGCTTCCCTCTGACTTTCGGAGGGG |
| | | GCACTCGCCTGGAAATCAAGACCACTACCCCAGCACCGAGGCCACCCACCCCGGCTCCTACCATCGCCTCCCAGCCTCTG |
| | | TCCCTGCGTCCGGAGGCATGTAGACCCGCAGCTGGTGGGGCCGTGCATACCCGGGGTCTTGACTTCGCCTGCGATATCTA |
| | | CATTTGGGCCCCTCTGGCTGGTACTTGCGGGGTCCTGCTGCTTTCACTCGTGATCACTCTTTACTGTAAGCGCGGTCGGA |
| | | AGAAGCTGCTGTACATCTTTAAGCAACCCTTCATGAGGCCTGTGCAGACTACTCAAGAGGAGGACGGCTGTTCATGCCGG |
| | | TTCCCAGAGGAGGAGGAAGGCGGCTGCGAACTGCGCGTGAAATTCAGCCGCAGCGCAGATGCTCCAGCCTACAAGCAGGG |
| | | GCAGAACCAGCTCTACAACGAACTCAATCTTGGTCGGAGAGAGGAGTACGACGTGCTGGACAAGCGGAGAGGACGGGACC |
| | | CAGAAATGGGCGGGAAGCCGCGCAGAAAGAATCCCCAAGAGGGCCTGTACAACGAGCTCCAAAAGGATAAGATGGCAGAA |
| | | GCCTATAGCGAGATTGGTATGAAAGGGGAACGCAGAAGAGGCAAAGGCCACGACGGACTGTACCAGGGACTCAGCACCGC |
| | | CACCAAGGACACCTATGACGCTCTTCACATGCAGGCCCTGCCGCCTCGG |
| 485 | M7 | CAAGTGCAATTGGTTCAA |
| | (ScFv | TCAGGAGGAGGAGTGGTGCAACCTGGAAGATCTCTCAGACTGTCGTGTGCGGCATCGGGATTCACTTTCTCATCATACGC |
| | domain) | AATGCACTGGGTCCGCCAGGCCCCGGGCAAAGGCTTGGAATGGGTGGCGGTCATTTCATACGACGGCTCGAACAAGTACT |
| | >VE12- | ACGCTGACAGCGTGAAGGGACGCTTTACTATTTCCCGGGACAATTCGAAGAACACTCTGTACCTCCAGATGAACTCCCTT |
| | 01CD | AGGGCTGAGGACACCGCCGTCTACTACTGCGCACGCTGGAAAGTGTCGTCCAGCTCCCCAGCTTTTGACTACTGGGGACA |
| | (M7) | GGGAACCCTTGTGACCGTGTCGTCCGGTGGAGGGGGAAGCGGCGGAGGGGGATCAGGTGGCGGCGGATCGGGAGGCGGGG |
| | | GATCAGAAATCGTGCTGACTCAGTCCCCGGCCACGCTGTCTCTCAGCCCGGGAGAGAGAGCGATCCTGTCCTGCCGCGCC |
| | | TCGCAGAGCGTGTACACTAAGTACCTGGGGTGGTACCAGCAGAAACCGGGTCAAGCGCCTCGGCTGCTGATCTACGATGC |
| | | CTCCACCCGGGCCACCGGAATCCCCGATCGGTTCTCCGGCAGCGGCTCGGGAACTGATTTCACGCTGACCATCAATCGCC |
| | | TGGAGCCGGAAGATTTCGCCGTCTATTACTGCCAGCATTACGGCGGGAGCCCACTCATCACCTTCGGTCAAGGAACCCGA |
| | | CTCGAAATCAAG |
| 486 | M7 | ATGGCCCTCCCTGTCACCGCCCTGCTGCTTCCGCTGGCTCTTCTGCTCCACGCCGCTCGGCCCCAAGTGCAATTGGTTCA |
| | (Full) | A |
| | >VE12- | TCAGGAGGAGGAGTGGTGCAACCTGGAAGATCTCTCAGACTGTCGTGTGCGGCATCGGGATTCACTTTCTCATCATACGC |
| | 01CD | AATGCACTGGGTCCGCCAGGCCCCGGGCAAAGGCTTGGAATGGGTGGCGGTCATTTCATACGACGGCTCGAACAAGTACT |
| | (M7) | ACGCTGACAGCGTGAAGGGACGCTTTACTATTTCCCGGGACAATTCGAAGAACACTCTGTACCTCCAGATGAACTCCCTT |
| | | AGGGCTGAGGACACCGCCGTCTACTACTGCGCACGCTGGAAAGTGTCGTCCAGCTCCCCAGCTTTTGACTACTGGGGACA |
| | | GGGAACCCTTGTGACCGTGTCGTCCGGTGGAGGGGGAAGCGGCGGAGGGGGATCAGGTGGCGGCGGATCGGGAGGCGGGG |
| | | GATCAGAAATCGTGCTGACTCAGTCCCCGGCCACGCTGTCTCTCAGCCCGGGAGAGAGAGCGATCCTGTCCTGCCGCGCC |
| | | TCGCAGAGCGTGTACACTAAGTACCTGGGGTGGTACCAGCAGAAACCGGGTCAAGCGCCTCGGCTGCTGATCTACGATGC |
| | | CTCCACCCGGGCCACCGGAATCCCCGATCGGTTCTCCGGCAGCGGCTCGGGAACTGATTTCACGCTGACCATCAATCGCC |
| | | TGGAGCCGGAAGATTTCGCCGTCTATTACTGCCAGCATTACGGCGGGAGCCCACTCATCACCTTCGGTCAAGGAACCCGA |
| | | CTCGAAATCAAGACCACTACCCCAGCACCGAGGCCACCCACCCCGGCTCCTACCATCGCCTCCCAGCCTCTGTCCCTGCG |
| | | TCCGGAGGCATGTAGACCCGCAGCTGGTGGGGCCGTGCATACCCGGGGTCTTGACTTCGCCTGCGATATCTACATTTGGG |
| | | CCCCTCTGGCTGGTACTTGCGGGGTCCTGCTGCTTTCACTCGTGATCACTCTTTACTGTAAGCGCGGTCGGAAGAAGCTG |
| | | CTGTACATCTTTAAGCAACCCTTCATGAGGCCTGTGCAGACTACTCAAGAGGAGGACGGCTGTTCATGCCGGTTCCCAGA |
| | | GGAGGAGGAAGGCGGCTGCGAACTGCGCGTGAAATTCAGCCGCAGCGCAGATGCTCCAGCCTACAAGCAGGGGCAGAACC |
| | | AGCTCTACAACGAACTCAATCTTGGTCGGAGAGAGGAGTACGACGTGCTGGACAAGCGGAGAGGACGGGACCCAGAAATG |
| | | GGCGGGAAGCCGCGCAGAAAGAATCCCCAAGAGGGCCTGTACAACGAGCTCCAAAAGGATAAGATGGCAGAAGCCTATAG |
| | | CGAGATTGGTATGAAAGGGGAACGCAGAAGAGGCAAAGGCCACGACGGACTGTACCAGGGACTCAGCACCGCCACCAAGG |
| | | ACACCTATGACGCTCTTCACATGCAGGCCCTGCCGCCTCGG |
| 487 | M8 | CAAGTCCAACTCCAGCAG |
| | (ScFv | TCAGGTGCAGAAGTCAAAAAGCCAGGAGCATCCGTGAAGGTTTCGTGCAAGACTTCCGGCTACCCTTTTACCGGGTACTC |
| | domain) | CCTCCATTGGGTGAGACAAGCACCGGGCCAGGGACTGGAGTGGATGGGATGGATCAACCCAAATTCGGGCGGCACCAACT |
| | >LE13- | ATGCGCAGAAGTTCCAGGGACGGGTGACCATGACTCGCGACACTTCGATCTCCACTGCCTACATGGAGCTGTCCCGCTTG |
| | 05XD | AGATCTGACGACACGGCCGTCTACTACTGCGCCCGGGATCACTACGGAGGTAATTCGCTGTTCTACTGGGGGCAGGGAAC |
| | (M8) | CCTTGTGACTGTGTCCTCGGGTGGTGGAGGGTCAGGAGGCGGAGGCTCAGGGGGAGGAGGTAGCGGAGGAGGCGGATCAG |
| | | ACATCCAACTGACCCAGTCACCATCCTCCATCTCGGCTAGCGTCGGAGACACCGTGTCGATTACTTGTAGGGCCTCCCAA |
| | | GACTCAGGGACGTGGCTGGCGTGGTATCAGCAAAAACCGGGCAAAGCTCCGAACCTGTTGATGTACGACGCCAGCACCCT |
| | | CGAAGATGGAGTGCCTAGCCGCTTCAGCGGAAGCGCCTCGGGCACTGAATTCACGCTGACTGTGAATCGGCTCCAGCCGG |
| | | AGGATTCGGCGACCTACTACTGCCAGCAGTACAACAGCTACCCCCTGACCTTTGGAGGCGGGACCAAGGTGGATATCAAG |
| 488 | M8 | ATGGCCCTCCCTGTCACCGCCCTGCTGCTTCCGCTGGCTCTTCTGCTCCACGCCGCTCGGCCCCAAGTCCAACTCCAGCA |
| | (Full) | G |
| | >LE13- | TCAGGTGCAGAAGTCAAAAAGCCAGGAGCATCCGTGAAGGTTTCGTGCAAGACTTCCGGCTACCCTTTTACCGGGTACTC |
| | 05XD | CCTCCATTGGGTGAGACAAGCACCGGGCCAGGGACTGGAGTGGATGGGATGGATCAACCCAAATTCGGGCGGCACCAACT |
| | (M8) | ATGCGCAGAAGTTCCAGGGACGGGTGACCATGACTCGCGACACTTCGATCTCCACTGCCTACATGGAGCTGTCCCGCTTG |
| | | AGATCTGACGACACGGCCGTCTACTACTGCGCCCGGGATCACTACGGAGGTAATTCGCTGTTCTACTGGGGGCAGGGAAC |
| | | CCTTGTGACTGTGTCCTCGGGTGGTGGAGGGTCAGGAGGCGGAGGCTCAGGGGGAGGAGGTAGCGGAGGAGGCGGATCAG |
| | | ACATCCAACTGACCCAGTCACCATCCTCCATCTCGGCTAGCGTCGGAGACACCGTGTCGATTACTTGTAGGGCCTCCCAA |
| | | GACTCAGGGACGTGGCTGGCGTGGTATCAGCAAAAACCGGGCAAAGCTCCGAACCTGTTGATGTACGACGCCAGCACCCT |
| | | CGAAGATGGAGTGCCTAGCCGCTTCAGCGGAAGCGCCTCGGGCACTGAATTCACGCTGACTGTGAATCGGCTCCAGCCGG |
| | | AGGATTCGGCGACCTACTACTGCCAGCAGTACAACAGCTACCCCCTGACCTTTGGAGGCGGGACCAAGGTGGATATCAAG |
| | | ACCACTACCCCAGCACCGAGGCCACCCACCCCGGCTCCTACCATCGCCTCCCAGCCTCTGTCCCTGCGTCCGGAGGCATG |
| | | TAGACCCGCAGCTGGTGGGGCCGTGCATACCCGGGGTCTTGACTTCGCCTGCGATATCTACATTTGGGCCCCTCTGGCTG |
| | | GTACTTGCGGGGTCCTGCTGCTTTCACTCGTGATCACTCTTTACTGTAAGCGCGGTCGGAAGAAGCTGCTGTACATCTTT |
| | | AAGCAACCCTTCATGAGGCCTGTGCAGACTACTCAAGAGGAGGACGGCTGTTCATGCCGGTTCCCAGAGGAGGAGGAAGG |
| | | CGGCTGCGAACTGCGCGTGAAATTCAGCCGCAGCGCAGATGCTCCAGCCTACAAGCAGGGGCAGAACCAGCTCTACAACG |
| | | AACTCAATCTTGGTCGGAGAGAGGAGTACGACGTGCTGGACAAGCGGAGAGGACGGGACCCAGAAATGGGCGGGAAGCCG |
| | | CGCAGAAAGAATCCCCAAGAGGGCCTGTACAACGAGCTCCAAAAGGATAAGATGGCAGAAGCCTATAGCGAGATTGGTAT |
| | | GAAAGGGGAACGCAGAAGAGGCAAAGGCCACGACGGACTGTACCAGGGACTCAGCACCGCCACCAAGGACACCTATGACG |
| | | CTCTTCACATGCAGGCCCTGCCGCCTCGG |
| 489 | M9 | CAAGTGCAACTCGTCCAG |
| | (ScFv | TCAGGTGCAGAAGTGAAGAAACCAGGAGCGTCCGTCGAAGTGTCGTGTAAGGCGTCCGGCTACACTTTCACCTCGTACTA |
| | domain) | CATGCACTGGGTGCGGCAGGCCCCGGGACAAGGCCTCGAATGGATGGGAATCATCAACCCGAGCGGAGGCTCGACTGGTT |
| | >BE15- | ACGCCCAGAAGTTCCAGGGAAGGGTGACGATGACCCGCGATACCTCGACTTCGACCGTTCATATGGAGCTCTCGTCCCTG |
| | 00SD | CGGAGCGAGGACACTGCTGTCTACTATTGCGCGCGGGGAGGATACTCTAGCTCCTCCGATGCATTTGACATTTGGGGCCA |
| | (M9) | GGGAACTATGGTGACCGTGTCATCAGGCGGAGGTGGATCAGGAGGAGGAGGGTCGGGAGGGGGAGGCAGCGGCGGGGGTG |
| | | GGTCGGACATTCAGATGACGCAGTCCCCTCCTAGCCTGAGCGCCTCGGTGGGTGACAGAGTGACCATCACTTGCAGAGCC |
| | | TCGCAAGACATCTCCTCCGCATTGGCTTGGTACCAGCAAAAGCCGGGCACTCCGCCGAAACTGCTCATCTACGATGCCTC |
| | | CTCACTGGAGTCAGGAGTCCCATCTCGCTTCTCGGGGTCAGGAAGCGGCACCGATTTTACCCTTACCATCTCCAGCCTGC |
| | | AGCCCGAGGACTTCGCCACGTACTACTGCCAACAGTTCAGCTCCTACCCACTGACCTTCGGGGGCGGAACTCGCCTGGAA |
| | | ATCAAG |
| 490 | M9 | ATGGCCCTCCCTGTCACCGCCCTGCTGCTTCCGCTGGCTCTTCTGCTCCACGCCGCTCGGCCCCAAGTGCAACTCGTCCA |
| | (Full) | G |
| | >BE15- | TCAGGTGCAGAAGTGAAGAAACCAGGAGCGTCCGTCGAAGTGTCGTGTAAGGCGTCCGGCTACACTTTCACCTCGTACTA |
| | 00SD | CATGCACTGGGTGCGGCAGGCCCCGGGACAAGGCCTCGAATGGATGGGAATCATCAACCCGAGCGGAGGCTCGACTGGTT |
| | (M9) | ACGCCCAGAAGTTCCAGGGAAGGGTGACGATGACCCGCGATACCTCGACTTCGACCGTTCATATGGAGCTCTCGTCCCTG |
| | | CGGAGCGAGGACACTGCTGTCTACTATTGCGCGCGGGGAGGATACTCTAGCTCCTCCGATGCATTTGACATTTGGGGCCA |
| | | GGGAACTATGGTGACCGTGTCATCAGGCGGAGGTGGATCAGGAGGAGGAGGGTCGGGAGGGGGAGGCAGCGGCGGGGGTG |
| | | GGTCGGACATTCAGATGACGCAGTCCCCTCCTAGCCTGAGCGCCTCGGTGGGTGACAGAGTGACCATCACTTGCAGAGCC |
| | | TCGCAAGACATCTCCTCCGCATTGGCTTGGTACCAGCAAAAGCCGGGCACTCCGCCGAAACTGCTCATCTACGATGCCTC |
| | | CTCACTGGAGTCAGGAGTCCCATCTCGCTTCTCGGGGTCAGGAAGCGGCACCGATTTTACCCTTACCATCTCCAGCCTGC |
| | | AGCCCGAGGACTTCGCCACGTACTACTGCCAACAGTTCAGCTCCTACCCACTGACCTTCGGGGGCGGAACTCGCCTGGAA |
| | | ATCAAGACCACTACCCCAGCACCGAGGCCACCCACCCCGGCTCCTACCATCGCCTCCCAGCCTCTGTCCCTGCGTCCGGA |
| | | GGCATGTAGACCCGCAGCTGGTGGGGCCGTGCATACCCGGGGTCTTGACTTCGCCTGCGATATCTACATTTGGGCCCCTC |
| | | TGGCTGGTACTTGCGGGGTCCTGCTGCTTTCACTCGTGATCACTCTTTACTGTAAGCGCGGTCGGAAGAAGCTGCTGTAC |
| | | ATCTTTAAGCAACCCTTCATGAGGCCTGTGCAGACTACTCAAGAGGAGGACGGCTGTTCATGCCGGTTCCCAGAGGAGGA |
| | | GGAAGGCGGCTGCGAACTGCGCGTGAAATTCAGCCGCAGCGCAGATGCTCCAGCCTACAAGCAGGGGCAGAACCAGCTCT |
| | | ACAACGAACTCAATCTTGGTCGGAGAGAGGAGTACGACGTGCTGGACAAGCGGAGAGGACGGGACCCAGAAATGGGCGGG |
| | | AAGCCGCGCAGAAAGAATCCCCAAGAGGGCCTGTACAACGAGCTCCAAAAGGATAAGATGGCAGAAGCCTATAGCGAGAT |
| | | TGGTATGAAAGGGGAACGCAGAAGAGGCAAAGGCCACGACGGACTGTACCAGGGACTCAGCACCGCCACCAAGGACACCT |
| | | ATGACGCTCTTCACATGCAGGCCCTGCCGCCTCGG |
| 491 | M10 | CAAGTGCAACTCGTCCAGAGCGGAGCAGAAGTCAAGAAGCCAGGAGCGTCAGTGAAAGTGTCATGCAAGGCCAGCGGCTA |
| | (ScFv | TACCTTTACTTCGTATGGG |
| | domain) | ATCTCCTGGGTGCGGCAGGCACCGGGCCAAGGACTGGAGTGGATGGGATGGATCTCAGCCTACAACGGTAACACCAACTA |
| | >RE16- | CGCCCAGAAGCTGCAAGGACGCGTGACCATGACTACTGATACGAGCACCTCCACTGCCTACATGGAATTGCGGTCCCTTC |
| | 05MD | GGTCGGACGATACTGCTGTGTACTACTGCGCAAGAGTCGCCGGAGGGATCTACTACTACTACGGCATGGACGTCTGGGGA |
| | (M10) | CAGGGAACCACCATTACGGTGTCGAGCGGAGGGGGAGGCTCGGGGGGAGGAGGAAGCGGAGGTGGCGGCTCCGGGGGCGG |
| | | CGGATCGGACATTGTGATGACCCAGACTCCTGACTCCCTGGCTGTTTCGTTGGGAGAGCGCGCGACTATCTCGTGTAAGT |
| | | CCAGCCACTCAGTCCTGTACAATCGCAATAACAAGAACTACCTCGCGTGGTACCAGCAAAAACCGGGTCAGCCGCCTAAA |
| | | CTCCTGTTCTACTGGGCCTCCACCAGAAAGAGCGGGGTGCCAGATCGATTCTCTGGATCAGGATCAGGTACCGACTTTAC |
| | | GCTGACCATCTCGTCCCTGCAGCCGGAGGATTTCGCGACTTACTTCTGCCAGCAGACTCAGACTTTCCCCCTCACCTTCG |
| | | GTCAAGGCACCAGGCTGGAAATCAAT |
| 492 | M10 | ATGGCCCTCCCTGTCACCGCCCTGCTGCTTCCGCTGGCTCTTCTGCTCCACGCCGCTCGGCCCCAAGTGCAACTCGTCCA |
| | (Full) | GAGCGGAGCAGAAGTCAAGAAGCCAGGAGCGTCAGTGAAAGTGTCATGCAAGGCCAGCGGCTATACCTTTACTTCGTATG |
| | >RE16- | GG |
| | 05MD | ATCTCCTGGGTGCGGCAGGCACCGGGCCAAGGACTGGAGTGGATGGGATGGATCTCAGCCTACAACGGTAACACCAACTA |
| | (M10) | CGCCCAGAAGCTGCAAGGACGCGTGACCATGACTACTGATACGAGCACCTCCACTGCCTACATGGAATTGCGGTCCCTTC |
| | | GGTCGGACGATACTGCTGTGTACTACTGCGCAAGAGTCGCCGGAGGGATCTACTACTACTACGGCATGGACGTCTGGGGA |
| | | CAGGGAACCACCATTACGGTGTCGAGCGGAGGGGGAGGCTCGGGGGGAGGAGGAAGCGGAGGTGGCGGCTCCGGGGGCGG |
| | | CGGATCGGACATTGTGATGACCCAGACTCCTGACTCCCTGGCTGTTTCGTTGGGAGAGCGCGCGACTATCTCGTGTAAGT |
| | | CCAGCCACTCAGTCCTGTACAATCGCAATAACAAGAACTACCTCGCGTGGTACCAGCAAAAACCGGGTCAGCCGCCTAAA |
| | | CTCCTGTTCTACTGGGCCTCCACCAGAAAGAGCGGGGTGCCAGATCGATTCTCTGGATCAGGATCAGGTACCGACTTTAC |
| | | GCTGACCATCTCGTCCCTGCAGCCGGAGGATTTCGCGACTTACTTCTGCCAGCAGACTCAGACTTTCCCCCTCACCTTCG |
| | | GTCAAGGCACCAGGCTGGAAATCAATACCACTACCCCAGCACCGAGGCCACCCACCCCGGCTCCTACCATCGCCTCCCAG |
| | | CCTCTGTCCCTGCGTCCGGAGGCATGTAGACCCGCAGCTGGTGGGGCCGTGCATACCCGGGGTCTTGACTTCGCCTGCGA |
| | | TATCTACATTTGGGCCCCTCTGGCTGGTACTTGCGGGGTCCTGCTGCTTTCACTCGTGATCACTCTTTACTGTAAGCGCG |
| | | GTCGGAAGAAGCTGCTGTACATCTTTAAGCAACCCTTCATGAGGCCTGTGCAGACTACTCAAGAGGAGGACGGCTGTTCA |
| | | TGCCGGTTCCCAGAGGAGGAGGAAGGCGGCTGCGAACTGCGCGTGAAATTCAGCCGCAGCGCAGATGCTCCAGCCTACAA |
| | | GCAGGGGCAGAACCAGCTCTACAACGAACTCAATCTTGGTCGGAGAGAGGAGTACGACGTGCTGGACAAGCGGAGAGGAC |
| | | GGGACCCAGAAATGGGCGGGAAGCCGCGCAGAAAGAATCCCCAAGAGGGCCTGTACAACGAGCTCCAAAAGGATAAGATG |
| | | GCAGAAGCCTATAGCGAGATTGGTATGAAAGGGGAACGCAGAAGAGGCAAAGGCCACGACGGACTGTACCAGGGACTCAG |
| | | CACCGCCACCAAGGACACCTATGACGCTCTTCACATGCAGGCCCTGCCGCCTCGG |
| 493 | M11 | CAAGTCCAATTGCAGCAGAGCGGAGCAGAAGTGAAGAAGCCAGGAGCGTCAGTCAAAGTGTCGTGTAAGGCGTCAGGATA |
| | (ScFv | CACCTTCACGGGATACTAC |
| | domain) | ATGCACTGGGTGCGCCAGGCCCCGGGCCAAGGACTCGAGTGGATGGGCTGGATCAACCCTAACTCTGGAGGCACCAACTA |
| | >NE10- | CGCCCAGAATTTCCAAGGCAGAGTGACCATGACCCGGGACACCTCCATCTCGACTGCCTATATGGAACTGCGGCGGCTGC |
| | 19WD | GCTCGGACGATACTGCTGTGTATTACTGCGCCAGCGGCTGGGACTTTGACTACTGGGGACAGGGTACTCTGGTGACTGTT |
| | (M11) | TCCTCGGGAGGAGGCGGATCGGGTGGAGGAGGTAGCGGGGGAGGGGGGTCGGGAGGCGGAGGCAGCGATATTCGCATGAC |
| | | TCAATCGCCGTCCTCCCTGAGCGCTAGCGTGGGAGATCGAGTCACCATCACTTGCAGAGCGTCACAGTCGATTCGCTACT |
| | | ACCTGTCCTGGTACCAGCAGAAACCGGGAAAGGCACCAAAGCTTCTGATCTACACGGCCTCCATCCTGCAAAATGGTGTC |
| | | CCATCAAGGTTCTCCGGGTCAGGGAGCGGCACTGACTTCACTCTCACCATCTCCTCACTCCAGCCCGAGGACTTTGCAAC |
| | | CTACTACTGCCTCCAGACGTACACCACCCCGGATTTCGGTCCTGGAACCAAGGTGGAAATCAAA |
| 494 | M11 | ATGGCCCTCCCTGTCACCGCCCTGCTGCTTCCGCTGGCTCTTCTGCTCCACGCCGCTCGGCCCCAAGTCCAATTGCAGCA |
| | (Full) | GAGCGGAGCAGAAGTGAAGAAGCCAGGAGGTCAGTCAAAGTGTCGTGTAAGGCGTCAGGATACACCTTCACGGGATACT |
| | >NE10- | AC |
| | 19WD | ATGCACTGGGTGCGCCAGGCCCCGGGCCAAGGACTCGAGTGGATGGGCTGGATCAACCCTAACTCTGGAGGCACCAACTA |
| | (M11) | CGCCCAGAATTTCCAAGGCAGAGTGACCATGACCCGGGACACCTCCATCTCGACTGCCTATATGGAACTGCGGCGGCTGC |
| | | GCTCGGACGATACTGCTGTGTATTACTGCGCCAGCGGCTGGGACTTTGACTACTGGGGACAGGGTACTCTGGTGACTGTT |
| | | TCCTCGGGAGGAGGCGGATCGGGTGGAGGAGGTAGCGGGGGAGGGGGGTCGGGAGGCGGAGGCAGCGATATTCGCATGAC |
| | | TCAATCGCCGTCCTCCCTGAGCGCTAGCGTGGGAGATCGAGTCACCATCACTTGCAGAGCGTCACAGTCGATTCGCTACT |
| | | ACCTGTCCTGGTACCAGCAGAAACCGGGAAAGGCACCAAAGCTTCTGATCTACACGGCCTCCATCCTGCAAAATGGTGTC |
| | | CCATCAAGGTTCTCCGGGTCAGGGAGCGGCACTGACTTCACTCTCACCATCTCCTCACTCCAGCCCGAGGACTTTGCAAC |
| | | CTACTACTGCCTCCAGACGTACACCACCCCGGATTTCGGTCCTGGAACCAAGGTGGAAATCAAAACCACTACCCCAGCAC |
| | | CGAGGCCACCCACCCCGGCTCCTACCATCGCCTCCCAGCCTCTGTCCCTGCGTCCGGAGGCATGTAGACCCGCAGCTGGT |
| | | GGGGCCGTGCATACCCGGGGTCTTGACTTCGCCTGCGATATCTACATTTGGGCCCCTCTGGCTGGTACTTGCGGGGTCCT |
| | | GCTGCTTTCACTCGTGATCACTCTTTACTGTAAGCGCGGTCGGAAGAAGCTGCTGTACATCTTTAAGCAACCCTTCATGA |
| | | GGCCTGTGCAGACTACTCAAGAGGAGGACGGCTGTTCATGCCGGTTCCCAGAGGAGGAGGAAGGCGGCTGCGAACTGCGC |
| | | GTGAAATTCAGCCGCAGCGCAGATGCTCCAGCCTACAAGCAGGGGCAGAACCAGCTCTACAACGAACTCAATCTTGGTCG |
| | | GAGAGAGGAGTACGACGTGCTGGACAAGCGGAGAGGACGGGACCCAGAAATGGGCGGGAAGCCGCGCAGAAAGAATCCCC |
| | | AAGAGGGCCTGTACAACGAGCTCCAAAAGGATAAGATGGCAGAAGCCTATAGCGAGATTGGTATGAAAGGGGAACGCAGA |
| | | AGAGGCAAAGGCCACGACGGACTGTACCAGGGACTCAGCACCGCCACCAAGGACACCTATGACGCTCTTCACATGCAGGC |
| | | CCTGCCGCCTCGG |
| 495 | M12 | CAAGTCCAACTCGTCCAA |
| | (ScFv | AGCGGAGCAGAAGTCAAAAAGCCAGGAGCGTCGGTGAAAGTGTCTTGCAAAGCCAGCGGCTACACCTTCACGGGTTACTA |
| | domain) | CATGCACTGGGTGCGCCAGGCGCCGGGCCAGGGGCTGGAGTGGATGGGCCGGATTAACCCTAACAGCGGGGGAACTAATT |
| | >DE12- | ACGCTCAGAAGTTCCAGGGTAGAGTCACCATGACTACGGACACTTCCACTTCCACCGCCTATATGGAACTGCGCTCCCTC |
| | 14RD | CGCTCAGATGATACTGCCGTGTATTACTGCGCGCGGACTACCACGTCATACGCATTTGACATCTGGGGCCAGGGAACTAT |
| | (M12) | GGTGACCGTGAGCTCGGGCGGAGGCGGTTCAGGGGGAGGAGGAAGCGGAGGAGGAGGATCGGGAGGAGGTGGCTCCGATA |
| | | TCCAGCTGACTCAGTCCCCGAGCACCCTGTCGGCGTCGGTGGGGGACAGGGTTACCATCACCTGTAGAGCTTCCCAATCC |
| | | ATTTCGACTTGGCTGGCCTGGTACCAGCAAAAGCCGGGAAAGGCCCCTAATTTGCTTATCTACAAGGCATCGACCCTCGA |
| | | AAGCGGTGTGCCCTCCCGGTTTTCGGGATCAGGATCAGGGACCGAGTTCACCCTGACCATCTCATCCCTCCAGCCGGACG |
| | | ACTTCGCCACTTACTACTGCCAGCAGTACAACACCTACTCGCCATACACTTTCGGCCAAGGCACCAAGCTGGAGATCAAG |
| 496 | M12 | ATGGCCCTCCCTGTCACCGCCCTGCTGCTTCCGCTGGCTCTTCTGCTCCACGCCGCTCGGCCCCAAGTCCAACTCGTCCA |
| | (Full) | A |
| | >DE12- | AGCGGAGCAGAAGTCAAAAAGCCAGGAGCGTCGGTGAAAGTGTCTTGCAAAGCCAGCGGCTACACCTTCACGGGTTACTA |
| | 14RD | CATGCACTGGGTGCGCCAGGCGCCGGGCCAGGGGCTGGAGTGGATGGGCCGGATTAACCCTAACAGCGGGGGAACTAATT |
| | (M12) | ACGCTCAGAAGTTCCAGGGTAGAGTCACCATGACTACGGACACTTCCACTTCCACCGCCTATATGGAACTGCGCTCCCTC |
| | | CGCTCAGATGATACTGCCGTGTATTACTGCGCGCGGACTACCACGTCATACGCATTTGACATCTGGGGCCAGGGAACTAT |
| | | GGTGACCGTGAGCTCGGGCGGAGGCGGTTCAGGGGGAGGAGGAAGCGGAGGAGGAGGATCGGGAGGAGGTGGCTCCGATA |
| | | TCCAGCTGACTCAGTCCCCGAGCACCCTGTCGGCGTCGGTGGGGGACAGGGTTACCATCACCTGTAGAGCTTCCCAATCC |
| | | ATTTCGACTTGGCTGGCCTGGTACCAGCAAAAGCCGGGAAAGGCCCCTAATTTGCTTATCTACAAGGCATCGACCCTCGA |
| | | AAGCGGTGTGCCCTCCCGGTTTTCGGGATCAGGATCAGGGACCGAGTTCACCCTGACCATCTCATCCCTCCAGCCGGACG |
| | | ACTTCGCCACTTACTACTGCCAGCAGTACAACACCTACTCGCCATACACTTTCGGCCAAGGCACCAAGCTGGAGATCAAG |
| | | ACCACTACCCCAGCACCGAGGCCACCCACCCCGGCTCCTACCATCGCCTCCCAGCCTCTGTCCCTGCGTCCGGAGGCATG |
| | | TAGACCCGCAGCTGGTGGGGCCGTGCATACCCGGGGTCTTGACTTCGCCTGCGATATCTACATTTGGGCCCCTCTGGCTG |
| | | GTACTTGCGGGGTCCTGCTGCTTTCACTCGTGATCACTCTTTACTGTAAGCGCGGTCGGAAGAAGCTGCTGTACATCTTT |
| | | AAGCAACCCTTCATGAGGCCTGTGCAGACTACTCAAGAGGAGGACGGCTGTTCATGCCGGTTCCCAGAGGAGGAGGAAGG |
| | | CGGCTGCGAACTGCGCGTGAAATTCAGCCGCAGCGCAGATGCTCCAGCCTACAAGCAGGGGCAGAACCAGCTCTACAACG |
| | | AACTCAATCTTGGTCGGAGAGAGGAGTACGACGTGCTGGACAAGCGGAGAGGACGGGACCCAGAAATGGGCGGGAAGCCG |
| | | CGCAGAAAGAATCCCCAAGAGGGCCTGTACAACGAGCTCCAAAAGGATAAGATGGCAGAAGCCTATAGCGAGATTGGTAT |
| | | GAAAGGGGAACGCAGAAGAGGCAAAGGCCACGACGGACTGTACCAGGGACTCAGCACCGCCACCAAGGACACCTATGACG |
| | | CTCTTCACATGCAGGCCCTGCCGCCTCGG |
| 497 | M13 | CAAGTTCAACTCGTGCAATCAGGTGGAGGACTCGTCAAACCCGGAGGATCATTGAGACTGTCATGCGAAGCGAGCGGTTT |
| | (ScFv | TATCTTCTCCGATTACTAT |
| | domain) | ATGGGATGGATTCGGCAGGCCCCGGGAAAGGGACTCGAATGGGTGTCATACATCGGAAGGTCAGGCTCGTCCATGTACTA |
| | >TE13- | CGCAGACTCGGTGAAAGGCAGATTCACCTTTAGCCGGGACAACGCCAAGAATTCCCTCTACTTGCAGATGAACAGCCTGC |
| | 19LD | GAGCCGAGGATACTGCTGTCTACTACTGTGCCGCGTCGCCGGTGGTGGCAGCTACTGAAGATTTCCAGCACTGGGGACAG |
| | (M13) | GGAACTCTGGTCACGGTGTCGAGCGGTGGGGGCGGAAGCGGAGGCGGAGGATCGGGCGGCGGAGGTTCGGGGGGGGGAGG |
| | | GTCTGACATCGTGATGACCCAAACCCCAGCCACCCTGAGCCTCTCCCCTGGAGAGCGCGCGACTCTTTCGTGCCGCGCTT |
| | | CCCAGTCAGTGACCAGCAATTACTTGGCTTGGTACCAACAGAAGCCGGGACAGGCGCCACGGCTGCTGCTTTTTGGTGCC |
| | | AGCACTCGCGCCACCGGAATCCCGGATCGCTTCTCGGGCTCAGGGTCCGGGACGGACTTCACCCTGACTATCAACCGGCT |
| | | GGAACCTGAGGACTTCGCGATGTACTACTGCCAGCAGTACGGCTCCGCACCAGTCACTTTCGGACAAGGCACCAAGCTGG |
| | | AGATCAAG |
| 498 | M13 | ATGGCCCTCCCTGTCACCGCCCTGCTGCTTCCGCTGGCTCTTCTGCTCCACGCCGCTCGGCCCCAAGTTCAACTCGTGCA |
| | (Full) | ATCAGGTGGAGGACTCGTCAAACCCGGAGGATCATTGAGACTGTCATGCGAAGCGAGCGGTTTTATCTTCTCCGATTACT |
| | >TE13- | AT |
| | 19LD | ATGGGATGGATTCGGCAGGCCCCGGGAAAGGGACTCGAATGGGTGTCATACATCGGAAGGTCAGGCTCGTCCATGTACTA |
| | (M13) | CGCAGACTCGGTGAAAGGCAGATTCACCTTTAGCCGGGACAACGCCAAGAATTCCCTCTACTTGCAGATGAACAGCCTGC |
| | | GAGCCGAGGATACTGCTGTCTACTACTGTGCCGCGTCGCCGGTGGTGGCAGCTACTGAAGATTTCCAGCACTGGGGACAG |
| | | GGAACTCTGGTCACGGTGTCGAGCGGTGGGGGCGGAAGCGGAGGCGGAGGATCGGGCGGCGGAGGTTCGGGGGGGGGAGG |
| | | GTCTGACATCGTGATGACCCAAACCCCAGCCACCCTGAGCCTCTCCCCTGGAGAGCGCGCGACTCTTTCGTGCCGCGCTT |
| | | CCCAGTCAGTGACCAGCAATTACTTGGCTTGGTACCAACAGAAGCCGGGACAGGCGCCACGGCTGCTGCTTTTTGGTGCC |
| | | AGCACTCGCGCCACCGGAATCCCGGATCGCTTCTCGGGCTCAGGGTCCGGGACGGACTTCACCCTGACTATCAACCGGCT |
| | | GGAACCTGAGGACTTCGCGATGTACTACTGCCAGCAGTACGGCTCCGCACCAGTCACTTTCGGACAAGGCACCAAGCTGG |
| | | AGATCAAGACCACTACCCCAGCACCGAGGCCACCCACCCCGGCTCCTACCATCGCCTCCCAGCCTCTGTCCCTGCGTCCG |
| | | GAGGCATGTAGACCCGCAGCTGGTGGGGCCGTGCATACCCGGGGTCTTGACTTCGCCTGCGATATCTACATTTGGGCCCC |
| | | TCTGGCTGGTACTTGCGGGGTCCTGCTGCTTTCACTCGTGATCACTCTTTACTGTAAGCGCGGTCGGAAGAAGCTGCTGT |
| | | ACATCTTTAAGCAACCCTTCATGAGGCCTGTGCAGACTACTCAAGAGGAGGACGGCTGTTCATGCCGGTTCCCAGAGGAG |
| | | GAGGAAGGCGGCTGCGAACTGCGCGTGAAATTCAGCCGCAGCGCAGATGCTCCAGCCTACAAGCAGGGGCAGAACCAGCT |
| | | CTACAACGAACTCAATCTTGGTCGGAGAGAGGAGTACGACGTGCTGGACAAGCGGAGAGGACGGGACCCAGAAATGGGCG |
| | | GGAAGCCGCGCAGAAAGAATCCCCAAGAGGGCCTGTACAACGAGCTCCAAAAGGATAAGATGGCAGAAGCCTATAGCGAG |
| | | ATTGGTATGAAAGGGGAACGCAGAAGAGGCAAAGGCCACGACGGACTGTACCAGGGACTCAGCACCGCCACCAAGGACAC |
| | | CTATGACGCTCTTCACATGCAGGCCCTGCCGCCTCGG |
| 499 | M14 | CAAGTCCAACTCGTCCAGTCGGGAGCAGAAGTTAGAGCACCAGGAGCGTCAGTGAAAATCTCATGCAAGGCCTCGGGCTT |
| | (ScFv | CACGTTCCGCGGATACTAC |
| | domain) | ATCCACTGGGTGCGCCAAGCCCCGGGTCAGGGATTGGAGTGGATGGGAATCATTAACCCATCAGGAGGGAGCCGGGCTTA |
| | >BS83- | CGCGCAGAAGTTCCAGGGACGCGTCACTATGACCCGAGATACTTCCACCTCGACTGTGTACATGGAACTCTCGTCCCTGA |
| | 95ID | GGTCCGACGACACTGCGATGTATTACTGTGCTCGGACTGCCAGCTGCGGTGGGGACTGTTACTACCTCGATTACTGGGGC |
| | (M14) | CAGGGAACTCTGGTGACCGTGTCCAGCGGAGGTGGCGGGTCAGGGGGTGGCGGAAGCGGAGGCGGCGGTTCAGGCGGAGG |
| | | AGGCTCGGACATCCAAATGACGCAATCGCCGCCTACCCTGAGCGCTTCCGTGGGAGATCGGGTGACCATTACTTGCAGAG |
| | | CATCCGAGAACGTCAATATCTGGCTGGCCTGGTACCAACAGAAGCCGGGGAAGGCCCCTAAACTGCTGATCTACAAGTCG |
| | | AGCAGCCTTGCCTCTGGAGTGCCCTCCCGCTTCTCGGGCTCGGGATCAGGAGCGGAATTCACCCTCACCATCTCCTCCCT |
| | | GCAGCCAGATGACTTTGCCACCTACTACTGCCAGCAGTACCAGAGCTATCCGTTGACCTTTGGGGGAGGCACTAAAGTGG |
| | | ACATCAAG |
| 500 | M14 | ATGGCCCTCCCTGTCACCGCCCTGCTGCTTCCGCTGGCTCTTCTGCTCCACGCCGCTCGGCCCCAAGTCCAACTCGTCCA |
| | (Full) | GTCGGGAGCAGAAGTTAGAGCACCAGGAGCGTCAGTGAAAATCTCATGCAAGGCCTCGGGCTTCACGTTCCGCGGATACT |
| | >BS83- | AC |
| | 95ID | ATCCACTGGGTGCGCCAAGCCCCGGGTCAGGGATTGGAGTGGATGGGAATCATTAACCCATCAGGAGGGAGCCGGGCTTA |
| | (M14) | CGCGCAGAAGTTCCAGGGACGCGTCACTATGACCCGAGATACTTCCACCTCGACTGTGTACATGGAACTCTCGTCCCTGA |
| | | GGTCCGACGACACTGCGATGTATTACTGTGCTCGGACTGCCAGCTGCGGTGGGGACTGTTACTACCTCGATTACTGGGGC |
| | | CAGGGAACTCTGGTGACCGTGTCCAGCGGAGGTGGCGGGTCAGGGGGTGGCGGAAGCGGAGGCGGCGGTTCAGGCGGAGG |
| | | AGGCTCGGACATCCAAATGACGCAATCGCCGCCTACCCTGAGCGCTTCCGTGGGAGATCGGGTGACCATTACTTGCAGAG |
| | | CATCCGAGAACGTCAATATCTGGCTGGCCTGGTACCAACAGAAGCCGGGGAAGGCCCCTAAACTGCTGATCTACAAGTCG |
| | | AGCAGCCTTGCCTCTGGAGTGCCCTCCCGCTTCTCGGGCTCGGGATCAGGAGCGGAATTCACCCTCACCATCTCCTCCCT |
| | | GCAGCCAGATGACTTTGCCACCTACTACTGCCAGCAGTACCAGAGCTATCCGTTGACCTTTGGGGGAGGCACTAAAGTGG |
| | | ACATCAAGACCACTACCCCAGCACCGAGGCCACCCACCCCGGCTCCTACCATCGCCTCCCAGCCTCTGTCCCTGCGTCCG |
| | | GAGGCATGTAGACCCGCAGCTGGTGGGGCCGTGCATACCCGGGGTCTTGACTTCGCCTGCGATATCTACATTTGGGCCCC |
| | | TCTGGCTGGTACTTGCGGGGTCCTGCTGCTTTCACTCGTGATCACTCTTTACTGTAAGCGCGGTCGGAAGAAGCTGCTGT |
| | | ACATCTTTAAGCAACCCTTCATGAGGCCTGTGCAGACTACTCAAGAGGAGGACGGCTGTTCATGCCGGTTCCCAGAGGAG |
| | | GAGGAAGGCGGCTGCGAACTGCGCGTGAAATTCAGCCGCAGCGCAGATGCTCCAGCCTACAAGCAGGGGCAGAACCAGCT |
| | | CTACAACGAACTCAATCTTGGTCGGAGAGAGGAGTACGACGTGCTGGACAAGCGGAGAGGACGGGACCCAGAAATGGGCG |
| | | GGAAGCCGCGCAGAAAGAATCCCCAAGAGGGCCTGTACAACGAGCTCCAAAAGGATAAGATGGCAGAAGCCTATAGCGAG |
| | | ATTGGTATGAAAGGGGAACGCAGAAGAGGCAAAGGCCACGACGGACTGTACCAGGGACTCAGCACCGCCACCAAGGACAC |
| | | CTATGACGCTCTTCACATGCAGGCCCTGCCGCCTCGG |
| 501 | M15 | CAAGTTCAACTCGTTCAA |
| | (ScFv | TCAGGTGGAGGACTCGTGCAACCAGGAAGATCACTCAGACTCAGCTGCGCCGCGTCGGGATTCACTTTCGATGACTACGC |
| | domain) | AATGCACTGGGTGCGGCAGGCCCCGGGCAAAGGACTGGAATGGGTGAGCGGAATTAGCTGGAACTCGGGGTCCATCGGGT |
| | >HS86- | ACGCCGACTCGGTGAAGGGACGCTTTACGATCTCCCGGGACAATGCCAAGAACTCCCTGTATTTGCAGATGAACTCCTTG |
| | 94XD | AGGGCTGAGGACACCGCCGTGTACTACTGCGCTAAAGATGGATCATCGTCCTGGTCCTGGGGATACTTCGATTACTGGGG |
| | (M15) | CCAGGGCACTCTGGTGACCGTGTCGTCAGGCGGTGGAGGGTCGGGCGGAGGAGGTAGCGGAGGCGGAGGGAGCAGCTCTG |
| | | AACTGACCCAAGACCCGGCGGTGTCGGTCGCCCTTGGTCAGACTGTGCGGACTACCTGTCAGGGGGACGCGCTGCGCTCG |
| | | TACTACGCTTCATGGTACCAGCAGAAGCCCGGACAGGCACCTATGCTGGTCATCTACGGAAAGAATAACCGCCCATCCGG |
| | | CATCCCGGATCGCTTCTCGGGTTCGGACAGCGGCGACACCGCATCCCTGACGATCACTGGAGCGCAGGCCGAGGATGAAG |
| | | CCGACTACTACTGCAATTCCCGAGATTCAAGCGGCTACCCTGTGTTTGGGACCGGAACTAAGGTCACCGTCCTG |
| 502 | M15 | ATGGCCCTCCCTGTCACCGCCCTGCTGCTTCCGCTGGCTCTTCTGCTCCACGCCGCTCGGCCCGAAGTTCAACTCGTTCA |
| | (Full) | A |
| | >HS86- | TCAGGTGGAGGACTCGTGCAACCAGGAAGATCACTCAGACTCAGCTGCGCCGCGTCGGGATTCACTTTCGATGACTACGC |
| | 94XD | AATGCACTGGGTGCGGCAGGCCCCGGGCAAAGGACTGGAATGGGTGAGCGGAATTAGCTGGAACTCGGGGTCCATCGGGT |
| | (M15) | ACGCCGACTCGGTGAAGGGACGCTTTACGATCTCCCGGGACAATGCCAAGAACTCCCTGTATTTGCAGATGAACTCCTTG |
| | | AGGGCTGAGGACACCGCCGTGTACTACTGCGCTAAAGATGGATCATCGTCCTGGTCCTGGGGATACTTCGATTACTGGGG |
| | | CCAGGGCACTCTGGTGACCGTGTCGTCAGGCGGTGGAGGGTCGGGCGGAGGAGGTAGCGGAGGCGGAGGGAGCAGCTCTG |
| | | AACTGACCCAAGACCCGGCGGTGTCGGTCGCCCTTGGTCAGACTGTGCGGACTACCTGTCAGGGGGACGCGCTGCGCTCG |
| | | TACTACGCTTCATGGTACCAGCAGAAGCCCGGACAGGCACCTATGCTGGTCATCTACGGAAAGAATAACCGCCCATCCGG |
| | | CATCCCGGATCGCTTCTCGGGTTCGGACAGCGGCGACACCGCATCCCTGACGATCACTGGAGCGCAGGCCGAGGATGAAG |
| | | CCGACTACTACTGCAATTCCCGAGATTCAAGCGGCTACCCTGTGTTTGGGACCGGAACTAAGGTCACCGTCCTGACCACT |
| | | ACCCCAGCACCGAGGCCACCCACCCCGGCTCCTACCATCGCCTCCCAGCCTCTGTCCCTGCGTCCGGAGGCATGTAGACC |
| | | CGCAGCTGGTGGGGCCGTGCATACCCGGGGTCTTGACTTCGCCTGCGATATCTACATTTGGGCCCCTCTGGCTGGTACTT |
| | | GCGGGGTCCTGCTGCTTTCACTCGTGATCACTCTTTACTGTAAGCGCGGTCGGAAGAAGCTGCTGTACATCTTTAAGCAA |
| | | CCCTTCATGAGGCCTGTGCAGACTACTCAAGAGGAGGACGGCTGTTCATGCCGGTTCCCAGAGGAGGAGGAAGGCGGCTG |
| | | CGAACTGCGCGTGAAATTCAGCCGCAGCGCAGATGCTCCAGCCTACAAGCAGGGGCAGAACCAGCTCTACAACGAACTCA |
| | | ATCTTGGTCGGAGAGAGGAGTACGACGTGCTGGACAAGCGGAGAGGACGGGACCCAGAAATGGGCGGGAAGCCGCGCAGA |
| | | AAGAATCCCCAAGAGGGCCTGTACAACGAGCTCCAAAAGGATAAGATGGCAGAAGCCTATAGCGAGATTGGTATGAAAGG |
| | | GGAACGCAGAAGAGGCAAAGGCCACGACGGACTGTACCAGGGACTCAGCACCGCCACCAAGGACACCTATGACGCTCTTC |
| | | ACATGCAGGCCCTGCCGCCTCGG |
| 503 | M16 | GAAGTGCAACTCGTGGAA |
| | (ScFv | TCTGGTGGAGGACTTGTGCAACCTGGAAGATCGTTGAGACTCTCATGTGCTGCCTCCGGGTTCACCTTTGACGACTACGC |
| | domain) | CATGCACTGGGTGCGCCAGGCACCAGGAAAGGGTCTGGAGTGGGTTTCGGGTATCTCGTGGAACTCCGGGAGCACTGGCT |
| | >XS87- | ACGCTGATTCGGTGAAAGGCCGGTTTACCATCTCCCGAGACAATGCGAAGAATTCCCTCTATCTGCAGATGAACAGCCTC |
| | 99RD | CGGGCCGAGGATACTGCCCTGTACTACTGCGCCAAGGATAGCTCATCATGGTACGGAGGTGGATCGGCTTTCGATATCTG |
| | (M16) | GGGCCAGGGCACGATGGTCACCGTGTCCTCGGGGGGCGGAGGCTCCGGGGGAGGAGGTAGCGGAGGAGGAGGATCGAGCT |
| | | CAGAGTTGACTCAAGAACCCGCAGTGTCCGTGGCACTGGGCCAAACCGTCAGGATCACTTGCCAGGGAGACAGCCTGAGG |
| | | TCGTACTACGCGTCCTGGTACCAGCAGAAGCCGGGACAGGCCCCGGTCCTGGTCATTTTCGGACGCTCAAGACGCCCATC |
| | | GGGCATCCCGGACCGGTTCAGCGGAAGCTCCTCGGGAAACACCGCGTCACTTATCATTACCGGCGCACAGGCTGAGGACG |
| | | AAGCGGATTACTACTGCAACTCCCGCGACAATACTGCCAACCATTACGTGTTCGGGACCGGAACGAAACTGACTGTCCTG |
| 504 | M16 | ATGGCCCTCCCTGTCACCGCCCTGCTGCTTCCGCTGGCTCTTCTGCTCCACGCCGCTCGGCCCGAAGTGCAACTCGTGGA |
| | (Full) | A |
| | >XS87- | TCTGGTGGAGGACTTGTGCAACCTGGAAGATCGTTGAGACTCTCATGTGCTGCCTCCGGGTTCACCTTTGACGACTACGC |
| | 99RD | CATGCACTGGGTGCGCCAGGCACCAGGAAAGGGTCTGGAGTGGGTTTCGGGTATCTCGTGGAACTCCGGGAGCACTGGCT |
| | (M16) | ACGCTGATTCGGTGAAAGGCCGGTTTACCATCTCCCGAGACAATGCGAAGAATTCCCTCTATCTGCAGATGAACAGCCTC |
| | | CGGGCCGAGGATACTGCCCTGTACTACTGCGCCAAGGATAGCTCATCATGGTACGGAGGTGGATCGGCTTTCGATATCTG |
| | | GGGCCAGGGCACGATGGTCACCGTGTCCTCGGGGGGCGGAGGCTCCGGGGGAGGAGGTAGCGGAGGAGGAGGATCGAGCT |
| | | CAGAGTTGACTCAAGAACCCGCAGTGTCCGTGGCACTGGGCCAAACCGTCAGGATCACTTGCCAGGGAGACAGCCTGAGG |
| | | TCGTACTACGCGTCCTGGTACCAGCAGAAGCCGGGACAGGCCCCGGTCCTGGTCATTTTCGGACGCTCAAGACGCCCATC |
| | | GGGCATCCCGGACCGGTTCAGCGGAAGCTCCTCGGGAAACACCGCGTCACTTATCATTACCGGCGCACAGGCTGAGGACG |
| | | AAGCGGATTACTACTGCAACTCCCGCGACAATACTGCCAACCATTACGTGTTCGGGACCGGAACGAAACTGACTGTCCTG |
| | | ACCACTACCCCAGCACCGAGGCCACCCACCCCGGCTCCTACCATCGCCTCCCAGCCTCTGTCCCTGCGTCCGGAGGCATG |
| | | TAGACCCGCAGCTGGTGGGGCCGTGCATACCCGGGGTCTTGACTTCGCCTGCGATATCTACATTTGGGCCCCTCTGGCTG |
| | | GTACTTGCGGGGTCCTGCTGCTTTCACTCGTGATCACTCTTTACTGTAAGCGCGGTCGGAAGAAGCTGCTGTACATCTTT |
| | | AAGCAACCCTTCATGAGGCCTGTGCAGACTACTCAAGAGGAGGACGGCTGTTCATGCCGGTTCCCAGAGGAGGAGGAAGG |
| | | CGGCTGCGAACTGCGCGTGAAATTCAGCCGCAGCGCAGATGCTCCAGCCTACAAGCAGGGGCAGAACCAGCTCTACAACG |
| | | AACTCAATCTTGGTCGGAGAGAGGAGTACGACGTGCTGGACAAGCGGAGAGGACGGGACCCAGAAATGGGCGGGAAGCCG |
| | | CGCAGAAAGAATCCCCAAGAGGGCCTGTACAACGAGCTCCAAAAGGATAAGATGGCAGAAGCCTATAGCGAGATTGGTAT |
| | | GAAAGGGGAACGCAGAAGAGGCAAAGGCCACGACGGACTGTACCAGGGACTCAGCACCGCCACCAAGGACACCTATGACG |
| | | CTCTTCACATGCAGGCCCTGCCGCCTCGG |
| 505 | M17 | GAAGTTCAATTGGTGGAA |
| | (ScFv | TCTGGAGGAGGACTTGTGCAACCCGGTAGATCTCTGAGACTGTCCTGTGCGGCATCGGGATTCACCTTCGACGACTACGC |
| | domain) | TATGCACTGGGTGAGACAAGCCCCTGGAAAAGGACTGGAGTGGGTGTCAGGCATCTCCTGGAATAGCGGGTCCACTGGAT |
| | >NS89- | ACGCCGATTCGGTCAAGGGTCGCTTCACCATTTCCCGGGACAATGCCAAGAACTCCCTGTACCTTCAAATGAACTCCCTC |
| | 94MD | CGGGCCGAGGATACCGCCCTCTACTACTGCGCCAAAGACAGCTCGTCATGGTATGGCGGAGGGTCGGCATTTGACATCTG |
| | (M17) | GGGACAGGGAACTATGGTGACTGTGTCATCAGGAGGCGGCGGAAGCGGCGGCGGCGGGTCCGGCGGAGGAGGGTCGTCCA |
| | | GCGAACTCACCCAAGATCCAGCAGTGAGCGTCGCGCTGGGCCAGACCGTCAGGATCACGTGCCAGGGAGATTCACTGCGC |
| | | TCATACTACGCGTCCTGGTACCAGCAGAAGCCGGGGCAGGCCCCGGTCCTCGTGATCTACGGAAAGAACAACCGCCCGTC |
| | | GGGTATCCCAGACCGCTTTTCGGGTAGCTCCAGCGGAAATACGGCTAGCCTGACCATCACTGGAGCACAGGCTGAGGATG |
| | | AAGCGGACTACTACTGCAATTCGCGGGGCTCATCGGGGAACCATTACGTGTTCGGAACTGGTACCAAGGTGACTGTCCTG |
| 506 | M17 | ATGGCCCTCCCTGTCACCGCCCTGCTGCTTCCGCTGGCTCTTCTGCTCCACGCCGCTCGGCCCGAAGTTCAATTGGTGGA |
| | (Full) | A |
| | >NS89- | TCTGGAGGAGGACTTGTGCAACCCGGTAGATCTCTGAGACTGTCCTGTGCGGCATCGGGATTCACCTTCGACGACTACGC |
| | 94MD | TATGCACTGGGTGAGACAAGCCCCTGGAAAAGGACTGGAGTGGGTGTCAGGCATCTCCTGGAATAGCGGGTCCACTGGAT |
| | (M17) | ACGCCGATTCGGTCAAGGGTCGCTTCACCATTTCCCGGGACAATGCCAAGAACTCCCTGTACCTTCAAATGAACTCCCTC |
| | | CGGGCCGAGGATACCGCCCTCTACTACTGCGCCAAAGACAGCTCGTCATGGTATGGCGGAGGGTCGGCATTTGACATCTG |
| | | GGGACAGGGAACTATGGTGACTGTGTCATCAGGAGGCGGCGGAAGCGGCGGCGGCGGGTCCGGCGGAGGAGGGTCGTCCA |
| | | GCGAACTCACCCAAGATCCAGCAGTGAGCGTCGCGCTGGGCCAGACCGTCAGGATCACGTGCCAGGGAGATTCACTGCGC |
| | | TCATACTACGCGTCCTGGTACCAGCAGAAGCCGGGGCAGGCCCCGGTCCTCGTGATCTACGGAAAGAACAACCGCCCGTC |
| | | GGGTATCCCAGACCGCTTTTCGGGTAGCTCCAGCGGAAATACGGCTAGCCTGACCATCACTGGAGCACAGGCTGAGGATG |
| | | AAGCGGACTACTACTGCAATTCGCGGGGCTCATCGGGGAACCATTACGTGTTCGGAACTGGTACCAAGGTGACTGTCCTG |
| | | ACCACTACCCCAGCACCGAGGCCACCCACCCCGGCTCCTACCATCGCCTCCCAGCCTCTGTCCCTGCGTCCGGAGGCATG |
| | | TAGACCCGCAGCTGGTGGGGCCGTGCATACCCGGGGTCTTGACTTCGCCTGCGATATCTACATTTGGGCCCCTCTGGCTG |
| | | GTACTTGCGGGGTCCTGCTGCTTTCACTCGTGATCACTCTTTACTGTAAGCGCGGTCGGAAGAAGCTGCTGTACATCTTT |
| | | AAGCAACCCTTCATGAGGCCTGTGCAGACTACTCAAGAGGAGGACGGCTGTTCATGCCGGTTCCCAGAGGAGGAGGAAGG |
| | | CGGCTGCGAACTGCGCGTGAAATTCAGCCGCAGCGCAGATGCTCCAGCCTACAAGCAGGGGCAGAACCAGCTCTACAACG |
| | | AACTCAATCTTGGTCGGAGAGAGGAGTACGACGTGCTGGACAAGCGGAGAGGACGGGACCCAGAAATGGGCGGGAAGCCG |
| | | CGCAGAAAGAATCCCCAAGAGGGCCTGTACAACGAGCTCCAAAAGGATAAGATGGCAGAAGCCTATAGCGAGATTGGTAT |
| | | GAAAGGGGAACGCAGAAGAGGCAAAGGCCACGACGGACTGTACCAGGGACTCAGCACCGCCACCAAGGACACCTATGACG |
| | | CTCTTCACATGCAGGCCCTGCCGCCTCGG |
| 507 | M18 | CAAGTGCAGCTCGTTCAATCAGGCGGAGGACTCGTTCAACCAGGAGGATCATTGCGACTCTCATGTGCGGCCTCTGGATT |
| | (ScFv | CACGTTTAGCTCATATTGG |
| | domain) | ATGCACTGGGTGCGGCAGGCGCCGGGGAAAGGTCTGGTGTGGGTCAGCCGCATCAACTCAGACGGCTCCTCGACTTCGTA |
| | >DS90- | CGCCGACTCCGTGAAGGGACGCTTTACCATTTCCCGCGACAACGCCAAGAATACCCTTTACCTTCAGATGAACTCCCTCC |
| | 09HD | GCGCTGAGGATACCGCCGTGTACTACTGCGTGAGGACTGGCTGGGTCGGCAGCTACTACTACTACATGGACGTGTGGGGC |
| | (M18) | AAAGGAACTACTGTCACCGTGTCAAGCGGCGGTGGAGGTTCCGGCGGGGGAGGATCGGGGGGGGGCGGATCGGGTGGCGG |
| | | AGGATCGGAGATCGTGTTGACCCAGTCGCCGGGAACCCTGTCGCTGTCGCCTGGGGAGAGAGCAACTCTGTCCTGCCGGG |
| | | CTTCCCAGTCGGTGTCGAGCAATTACCTGGCATGGTACCAACAGAAGCCGGGACAGCCGCCACGCCTGCTGATCTATGAC |
| | | GTGTCAACTCGGGCAACTGGAATCCCTGCGCGGTTCAGCGGCGGAGGGAGCGGTACCGATTTCACCCTGACTATTTCCTC |
| | | CCTCGAACCAGAAGATTTCGCCGTCTACTACTGCCAGCAGAGAAGCAACTGGCCGCCCTGGACGTTCGGACAAGGAACCA |
| | | AGGTCGAAATCAAG |
| 508 | M18 | ATGGCCCTCCCTGTCACCGCCCTGCTGCTTCCGCTGGCTCTTCTGCTCCACGCCGCTCGGCCCCAAGTGCAGCTCGTTCA |
| | (Full) | ATCAGGCGGAGGACTCGTTCAACCAGGAGGATCATTGCGACTCTCATGTGCGGCCTCTGGATTCACGTTTAGCTCATATT |
| | >DS90- | GG |
| | 09HD | ATGCACTGGGTGCGGCAGGCGCCGGGGAAAGGTCTGGTGTGGGTCAGCCGCATCAACTCAGACGGCTCCTCGACTTCGTA |
| | (M18) | CGCCGACTCCGTGAAGGGACGCTTTACCATTTCCCGCGACAACGCCAAGAATACCCTTTACCTTCAGATGAACTCCCTCC |
| | | GCGCTGAGGATACCGCCGTGTACTACTGCGTGAGGACTGGCTGGGTCGGCAGCTACTACTACTACATGGACGTGTGGGGC |
| | | AAAGGAACTACTGTCACCGTGTCAAGCGGCGGTGGAGGTTCCGGCGGGGGAGGATCGGGGGGGGGCGGATCGGGTGGCGG |
| | | AGGATCGGAGATCGTGTTGACCCAGTCGCCGGGAACCCTGTCGCTGTCGCCTGGGGAGAGAGCAACTCTGTCCTGCCGGG |
| | | CTTCCCAGTCGGTGTCGAGCAATTACCTGGCATGGTACCAACAGAAGCCGGGACAGCCGCCACGCCTGCTGATCTATGAC |
| | | GTGTCAACTCGGGCAACTGGAATCCCTGCGCGGTTCAGCGGCGGAGGGAGCGGTACCGATTTCACCCTGACTATTTCCTC |
| | | CCTCGAACCAGAAGATTTCGCCGTCTACTACTGCCAGCAGAGAAGCAACTGGCCGCCCTGGACGTTCGGACAAGGAACCA |
| | | AGGTCGAAATCAAGACCACTACCCCAGCACCGAGGCCACCCACCCCGGCTCCTACCATCGCCTCCCAGCCTCTGTCCCTG |
| | | CGTCCGGAGGCATGTAGACCCGCAGCTGGTGGGGCCGTGCATACCCGGGGTCTTGACTTCGCCTGCGATATCTACATTTG |
| | | GGCCCCTCTGGCTGGTACTTGCGGGGTCCTGCTGCTTTCACTCGTGATCACTCTTTACTGTAAGCGCGGTCGGAAGAAGC |
| | | TGCTGTACATCTTTAAGCAACCCTTCATGAGGCCTGTGCAGACTACTCAAGAGGAGGACGGCTGTTCATGCCGGTTCCCA |
| | | GAGGAGGAGGAAGGCGGCTGCGAACTGCGCGTGAAATTCAGCCGCAGCGCAGATGCTCCAGCCTACAAGCAGGGGCAGAA |
| | | CCAGCTCTACAACGAACTCAATCTTGGTCGGAGAGAGGAGTACGACGTGCTGGACAAGCGGAGAGGACGGGACCCAGAAA |
| | | TGGGCGGGAAGCCGCGCAGAAAGAATCCCCAAGAGGGCCTGTACAACGAGCTCCAAAAGGATAAGATGGCAGAAGCCTAT |
| | | AGCGAGATTGGTATGAAAGGGGAACGCAGAAGAGGCAAAGGCCACGACGGACTGTACCAGGGACTCAGCACCGCCACCAA |
| | | GGACACCTATGACGCTCTTCACATGCAGGCCCTGCCGCCTCGG |
| 509 | M19 | CAAGTGCAATTGGTTCAA |
| | (ScFv | TCAGGAGGAGGAGTCGTGCAGCCCGGAAGATCGTTGAGACTGTCATGTGCCGCGAGCGGCTTTACTTTCTCAAGCTACGG |
| | domain) | AATGCATTGGGTGCGACAGGCTCCGGGAAAAGGACTGGAATGGGTCGCAGTGATCTCATACGACGGCTCGAACAAGTACT |
| | >TS92- | ACGCCGACTCCGTCAAGGGTCGGTTCACGATTTCGCGCGATAATTCCAAGAACACTCTGTACCTCCAAATGAACAGCCTC |
| | 04BD | CGGGCAGAGGACACCGCCGTCTACTACTGCGCTAAGGGATACTCGCGCTACTACTACTATGGAATGGATGTGTGGGGCCA |
| | (M19) | GGGAACTACCGTGACGGTGTCGTCCGGCGGCGGTGGGTCGGGCGGAGGCGGATCAGGTGGAGGTGGAAGCGGAGGAGGAG |
| | | GGAGCGAAATCGTCATGACTCAGTCCCCTGCTACCCTTTCTCTGTCGCCGGGAGAAAGAGCCATCCTGAGCTGCCGGGCC |
| | | TCCCAGAGCGTGTACACCAAATACCTGGGATGGTACCAGCAGAAGCCGGGGCAGGCACCAAGGCTCCTGATCTACGATGC |
| | | GTCCACCCGCGCGACTGGTATCCCAGACCGCTTTTCCGGCTCGGGGTCAGGGACTGACTTCACCCTTACTATCAATCGGC |
| | | TCGAGCCTGAGGATTTCGCCGTGTATTACTGCCAGCACTACGGAGGGTCCCCGCTGATTACCTTCGGCCAAGGCACCAAA |
| | | GTGGACATCAAG |
| 510 | M19 | ATGGCCCTCCCTGTCACCGCCCTGCTGCTTCCGCTGGCTCTTCTGCTCCACGCCGCTCGGCCCCAAGTGCAATTGGTTCA |
| | (Full) | A |
| | >TS92- | TCAGGAGGAGGAGTCGTGCAGCCCGGAAGATCGTTGAGACTGTCATGTGCCGCGAGCGGCTTTACTTTCTCAAGCTACGG |
| | 04BD | AATGCATTGGGTGCGACAGGCTCCGGGAAAAGGACTGGAATGGGTCGCAGTGATCTCATACGACGGCTCGAACAAGTACT |
| | (M19) | ACGCCGACTCCGTCAAGGGTCGGTTCACGATTTCGCGCGATAATTCCAAGAACACTCTGTACCTCCAAATGAACAGCCTC |
| | | CGGGCAGAGGACACCGCCGTCTACTACTGCGCTAAGGGATACTCGCGCTACTACTACTATGGAATGGATGTGTGGGGCCA |
| | | GGGAACTACCGTGACGGTGTCGTCCGGCGGCGGTGGGTCGGGCGGAGGCGGATCAGGTGGAGGTGGAAGCGGAGGAGGAG |
| | | GGAGCGAAATCGTCATGACTCAGTCCCCTGCTACCCTTTCTCTGTCGCCGGGAGAAAGAGCCATCCTGAGCTGCCGGGCC |
| | | TCCCAGAGCGTGTACACCAAATACCTGGGATGGTACCAGCAGAAGCCGGGGCAGGCACCAAGGCTCCTGATCTACGATGC |
| | | GTCCACCCGCGCGACTGGTATCCCAGACCGCTTTTCCGGCTCGGGGTCAGGGACTGACTTCACCCTTACTATCAATCGGC |
| | | TCGAGCCTGAGGATTTCGCCGTGTATTACTGCCAGCACTACGGAGGGTCCCCGCTGATTACCTTCGGCCAAGGCACCAAA |
| | | GTGGACATCAAGACCACTACCCCAGCACCGAGGCCACCCACCCCGGCTCCTACCATCGCCTCCCAGCCTCTGTCCCTGCG |
| | | TCCGGAGGCATGTAGACCCGCAGCTGGTGGGGCCGTGCATACCCGGGGTCTTGACTTCGCCTGCGATATCTACATTTGGG |
| | | CCCCTCTGGCTGGTACTTGCGGGGTCCTGCTGCTTTCACTCGTGATCACTCTTTACTGTAAGCGCGGTCGGAAGAAGCTG |
| | | CTGTACATCTTTAAGCAACCCTTCATGAGGCCTGTGCAGACTACTCAAGAGGAGGACGGCTGTTCATGCCGGTTCCCAGA |
| | | GGAGGAGGAAGGCGGCTGCGAACTGCGCGTGAAATTCAGCCGCAGCGCAGATGCTCCAGCCTACAAGCAGGGGCAGAACC |
| | | AGCTCTACAACGAACTCAATCTTGGTCGGAGAGAGGAGTACGACGTGCTGGACAAGCGGAGAGGACGGGACCCAGAAATG |
| | | GGCGGGAAGCCGCGCAGAAAGAATCCCCAAGAGGGCCTGTACAACGAGCTCCAAAAGGATAAGATGGCAGAAGCCTATAG |
| | | CGAGATTGGTATGAAAGGGGAACGCAGAAGAGGCAAAGGCCACGACGGACTGTACCAGGGACTCAGCACCGCCACCAAGG |
| | | ACACCTATGACGCTCTTCACATGCAGGCCCTGCCGCCTCGG |
| 511 | M20 | CAAGTGCAACTTGTTCAATCAGGAGGAGGACTCGTTCAACCCGGAGGATCACTGCGACTCTCATGTGCAGCGTCGGGGTT |
| | (ScFv | CACCTTCTCCAGCTACGCA |
| | domain) | ATGTCCTGGGTGCGCCAAGCCCCTGGAAAAGGCCTGGAGTGGGTGTCGGCCATCTCTGGGAGCGGGGGATCAACTTACTA |
| | >JS93- | CGCTGACTCCGTCAAGGGCCGCTTTACCATCTCCCGGGACAACAGCAAGAACACTCTCTATCTCCAGATGAACTCGCTGA |
| | 08WD | GAGCCGAAGATACCGCTGTCTACTACTGCGCGAAGAGAGAAGCTGCCGCAGGGCACGATTGGTACTTCGACTTGTGGGGC |
| | (M20) | AGGGGCACCCTTGTGACCGTGTCCTCCGGTGGAGGCGGATCAGGAGGTGGGGGATCGGGTGGAGGAGGAAGCGGAGGCGG |
| | | CGGTTCGGACATTCGCGTCACCCAGTCACCGAGCTCCCTCAGCGCATCGGTGGGCGACCGGGTCACTATCACTTGCCGGG |
| | | CGTCCCAGTCGATCTCATCGTATCTGAATTGGTACCAGCAGAAACCGGGAAAGGCGCCGAAGCTGTTGATCTACGCTGCC |
| | | AGCTCCCTGCAGTCGGGTGTGCCATCACGCTTTTCCGGCTCGGGATCGGGAACCGATTTCACTCTGACGATCTCTAGCCT |
| | | GCAGCCAGAAGATTTCGCCACTTACTACTGCCAGCAGTCCTACAGCATCCCTCTGACTTTCGGACAAGGGACGAAAGTGG |
| | | AGATTAAG |
| 512 | M20 | ATGGCCCTCCCTGTCACCGCCCTGCTGCTTCCGCTGGCTCTTCTGCTCCACGCCGCTCGGCCCCAAGTGCAACTTGTTCA |
| | (Full) | ATCAGGAGGAGGACTCGTTCAACCCGGAGGATCACTGCGACTCTCATGTGCAGCGTCGGGGTTCACCTTCTCCAGCTACG |
| | >JS93- | CA |
| | 08WD | ATGTCCTGGGTGCGCCAAGCCCCTGGAAAAGGCCTGGAGTGGGTGTCGGCCATCTCTGGGAGCGGGGGATCAACTTACTA |
| | (M20) | CGCTGACTCCGTCAAGGGCCGCTTTACCATCTCCCGGGACAACAGCAAGAACACTCTCTATCTCCAGATGAACTCGCTGA |
| | | GAGCCGAAGATACCGCTGTCTACTACTGCGCGAAGAGAGAAGCTGCCGCAGGGCACGATTGGTACTTCGACTTGTGGGGC |
| | | AGGGGCACCCTTGTGACCGTGTCCTCCGGTGGAGGCGGATCAGGAGGTGGGGGATCGGGTGGAGGAGGAAGCGGAGGCGG |
| | | CGGTTCGGACATTCGCGTCACCCAGTCACCGAGCTCCCTCAGCGCATCGGTGGGCGACCGGGTCACTATCACTTGCCGGG |
| | | CGTCCCAGTCGATCTCATCGTATCTGAATTGGTACCAGCAGAAACCGGGAAAGGCGCCGAAGCTGTTGATCTACGCTGCC |
| | | AGCTCCCTGCAGTCGGGTGTGCCATCACGCTTTTCCGGCTCGGGATCGGGAACCGATTTCACTCTGACGATCTCTAGCCT |
| | | GCAGCCAGAAGATTTCGCCACTTACTACTGCCAGCAGTCCTACAGCATCCCTCTGACTTTCGGACAAGGGACGAAAGTGG |
| | | AGATTAAGACCACTACCCCAGCACCGAGGCCACCCACCCCGGCTCCTACCATCGCCTCCCAGCCTCTGTCCCTGCGTCCG |
| | | GAGGCATGTAGACCCGCAGCTGGTGGGGCCGTGCATACCCGGGGTCTTGACTTCGCCTGCGATATCTACATTTGGGCCCC |
| | | TCTGGCTGGTACTTGCGGGGTCCTGCTGCTTTCACTCGTGATCACTCTTTACTGTAAGCGCGGTCGGAAGAAGCTGCTGT |
| | | ACATCTTTAAGCAACCCTTCATGAGGCCTGTGCAGACTACTCAAGAGGAGGACGGCTGTTCATGCCGGTTCCCAGAGGAG |
| | | GAGGAAGGCGGCTGCGAACTGCGCGTGAAATTCAGCCGCAGCGCAGATGCTCCAGCCTACAAGCAGGGGCAGAACCAGCT |
| | | CTACAACGAACTCAATCTTGGTCGGAGAGAGGAGTACGACGTGCTGGACAAGCGGAGAGGACGGGACCCAGAAATGGGCG |
| | | GGAAGCCGCGCAGAAAGAATCCCCAAGAGGGCCTGTACAACGAGCTCCAAAAGGATAAGATGGCAGAAGCCTATAGCGAG |
| | | ATTGGTATGAAAGGGGAACGCAGAAGAGGCAAAGGCCACGACGGACTGTACCAGGGACTCAGCACCGCCACCAAGGACAC |
| | | CTATGACGCTCTTCACATGCAGGCCCTGCCGCCTCGG |
| 513 | M21 | CAAGTCCAACTCGTTCAGTCATGGGCAGAAGTCAAGAAACCCGGTGCAAGCGTCAAAGTGTCGTGTAAGGCCTCCGGCTA |
| | (ScFv | CACTTTCACTTCCTACTAC |
| | domain) | ATGCACTGGGTGCGCCAAGCCCCGGGACAGGGCCTTGAATGGATGGGCATCATCAACCCATCAGGAGGTTCCACGAGCTA |
| | >ZS95- | CGCGCAGAAGTTCCAGGGGAGAGTGACGATGACTAGAGATACCTCCACGAGCACCGTCTACATGGAGCTGTCGAATCTGC |
| | 03QD | GGTCAGAGGACACTGCTGTGTATTACTGCGCGCGCTCCCCGCGGGTGACCACTGGCTACTTTGACTACTGGGGACAAGGG |
| | (M21) | ACCCTGGTGACCGTCAGCTCGGGAGGCGGAGGATCGGGAGGTGGAGGGTCCGGTGGAGGCGGCTCTGGAGGAGGCGGGTC |
| | | GGACATTCAATTGACCCAGAGCCCATCCACCCTCTCAGCCTCGGTGGGGGATAGGGTGACTATCACTTGCCGGGCCTCCC |
| | | AGTCAATTTCCAGCTGGCTGGCTTGGTACCAGCAAAAGCCTGGAAAGGCACCGAAGCTCCTGATCTACAAGGCCTCATCT |
| | | CTGGAATCAGGAGTGCCTTCGCGCTTCAGCGGAAGCGGCTCGGGAACTGAGTTTACCCTGACCATCTCGAGCCTGCAGCC |
| | | AGATGACTTCGCGACCTATTACTGCCAGCAGTACTCGTCCTACCCGTTGACTTTCGGAGGAGGTACCCGCCTCGAAATCA |
| | | AA |
| 514 | M21 | ATGGCCCTCCCTGTCACCGCCCTGCTGCTTCCGCTGGCTCTTCTGCTCCACGCCGCTCGGCCCCAAGTCCAACTCGTTCA |
| | (Full) | GTCATGGGCAGAAGTCAAGAAACCCGGTGCAAGCGTCAAAGTGTCGTGTAAGGCCTCCGGCTACACTTTCACTTCCTACT |
| | >ZS95- | AC |
| | 03QD | ATGCACTGGGTGCGCCAAGCCCCGGGACAGGGCCTTGAATGGATGGGCATCATCAACCCATCAGGAGGTTCCACGAGCTA |
| | (M21) | CGCGCAGAAGTTCCAGGGGAGAGTGACGATGACTAGAGATACCTCCACGAGCACCGTCTACATGGAGCTGTCGAATCTGC |
| | | GGTCAGAGGACACTGCTGTGTATTACTGCGCGCGCTCCCCGCGGGTGACCACTGGCTACTTTGACTACTGGGGACAAGGG |
| | | ACCCTGGTGACCGTCAGCTCGGGAGGCGGAGGATCGGGAGGTGGAGGGTCCGGTGGAGGCGGCTCTGGAGGAGGCGGGTC |
| | | GGACATTCAATTGACCCAGAGCCCATCCACCCTCTCAGCCTCGGTGGGGGATAGGGTGACTATCACTTGCCGGGCCTCCC |
| | | AGTCAATTTCCAGCTGGCTGGCTTGGTACCAGCAAAAGCCTGGAAAGGCACCGAAGCTCCTGATCTACAAGGCCTCATCT |
| | | CTGGAATCAGGAGTGCCTTCGCGCTTCAGCGGAAGCGGCTCGGGAACTGAGTTTACCCTGACCATCTCGAGCCTGCAGCC |
| | | AGATGACTTCGCGACCTATTACTGCCAGCAGTACTCGTCCTACCCGTTGACTTTCGGAGGAGGTACCCGCCTCGAAATCA |
| | | AAACCACTACCCCAGCACCGAGGCCACCCACCCCGGCTCCTACCATCGCCTCCCAGCCTCTGTCCCTGCGTCCGGAGGCA |
| | | TGTAGACCCGCAGCTGGTGGGGCCGTGCATACCCGGGGTCTTGACTTCGCCTGCGATATCTACATTTGGGCCCCTCTGGC |
| | | TGGTACTTGCGGGGTCCTGCTGCTTTCACTCGTGATCACTCTTTACTGTAAGCGCGGTCGGAAGAAGCTGCTGTACATCT |
| | | TTAAGCAACCCTTCATGAGGCCTGTGCAGACTACTCAAGAGGAGGACGGCTGTTCATGCCGGTTCCCAGAGGAGGAGGAA |
| | | GGCGGCTGCGAACTGCGCGTGAAATTCAGCCGCAGCGCAGATGCTCCAGCCTACAAGCAGGGGCAGAACCAGCTCTACAA |
| | | CGAACTCAATCTTGGTCGGAGAGAGGAGTACGACGTGCTGGACAAGCGGAGAGGACGGGACCCAGAAATGGGCGGGAAGC |
| | | CGCGCAGAAAGAATCCCCAAGAGGGCCTGTACAACGAGCTCCAAAAGGATAAGATGGCAGAAGCCTATAGCGAGATTGGT |
| | | ATGAAAGGGGAACGCAGAAGAGGCAAAGGCCACGACGGACTGTACCAGGGACTCAGCACCGCCACCAAGGACACCTATGA |
| | | CGCTCTTCACATGCAGGCCCTGCCGCCTCGG |
| 515 | M22 | CAAGTCCAACTCGTCCAGTCCGGTGCAGAAGTCAGAAGGCCAGGAGCAAGCGTGAAGATCTCGTGTAGAGCGTCAGGAGA |
| | (ScFv | CACCAGCACTCGCCATTAC |
| | domain) | ATCCACTGGCTGCGCCAGGCTCCGGGCCAAGGGCCGGAGTGGATGGGTGTGATCAACCCGACTACGGGACCGGCTACCGG |
| | >PS96- | AAGCCCTGCGTACGCACAGATGCTGCAGGGACGGGTGACTATGACCCGCGATACTAGCACTAGGACCGTGTACATGGAAC |
| | 08LD | TCCGCTCGTTGCGGTTCGAAGATACCGCCGTCTACTACTGCGCCCGGTCCGTGGTGGGCCGAAGCGCCCCTTACTACTTC |
| | (M22) | GATTACTGGGGACAGGGCACTCTGGTGACCGTTAGCTCCGGTGGGGGAGGCTCGGGTGGAGGCGGATCGGGAGGAGGAGG |
| | | CAGCGGTGGAGGGGGATCGGACATTCAGATGACCCAGTCACCCTCCTCCCTCTCAGCCTCGGTCGGGGACCGGGTGACCA |
| | | TTACGTGCAGAGCCTCACAAGGGATCTCGGACTACTCCGCCTGGTACCAGCAGAAACCGGGAAAAGCGCCAAAGCTCCTG |
| | | ATCTACGCCGCGAGCACCCTGCAATCAGGAGTGCCATCGCGCTTTTCTGGATCGGGCTCAGGGACTGACTTCACGCTGAC |
| | | TATCTCCTACCTTCAGTCCGAGGATTTCGCTACCTACTACTGCCAACAGTATTACTCCTATCCCCTGACCTTTGGCGGAG |
| | | GCACTAAGGTGGACATCAAG |
| 516 | M22 | ATGGCCCTCCCTGTCACCGCCCTGCTGCTTCCGCTGGCTCTTCTGCTCCACGCCGCTCGGCCCCAAGTCCAACTCGTCCA |
| | (Full) | GTCCGGTGCAGAAGTCAGAAGGCCAGGAGCAAGCGTGAAGATCTCGTGTAGAGCGTCAGGAGACACCAGCACTCGCCATT |
| | >PS96- | AC |
| | 08LD | ATCCACTGGCTGCGCCAGGCTCCGGGCCAAGGGCCGGAGTGGATGGGTGTGATCAACCCGACTACGGGACCGGCTACCGG |
| | (M22) | AAGCCCTGCGTACGCACAGATGCTGCAGGGACGGGTGACTATGACCCGCGATACTAGCACTAGGACCGTGTACATGGAAC |
| | | TCCGCTCGTTGCGGTTCGAAGATACCGCCGTCTACTACTGCGCCCGGTCCGTGGTGGGCCGAAGCGCCCCTTACTACTTC |
| | | GATTACTGGGGACAGGGCACTCTGGTGACCGTTAGCTCCGGTGGGGGAGGCTCGGGTGGAGGCGGATCGGGAGGAGGAGG |
| | | CAGCGGTGGAGGGGGATCGGACATTCAGATGACCCAGTCACCCTCCTCCCTCTCAGCCTCGGTCGGGGACCGGGTGACCA |
| | | TTACGTGCAGAGCCTCACAAGGGATCTCGGACTACTCCGCCTGGTACCAGCAGAAACCGGGAAAAGCGCCAAAGCTCCTG |
| | | ATCTACGCCGCGAGCACCCTGCAATCAGGAGTGCCATCGCGCTTTTCTGGATCGGGCTCAGGGACTGACTTCACGCTGAC |
| | | TATCTCCTACCTTCAGTCCGAGGATTTCGCTACCTACTACTGCCAACAGTATTACTCCTATCCCCTGACCTTTGGCGGAG |
| | | GCACTAAGGTGGACATCAAGACCACTACCCCAGCACCGAGGCCACCCACCCCGGCTCCTACCATCGCCTCCCAGCCTCTG |
| | | TCCCTGCGTCCGGAGGCATGTAGACCCGCAGCTGGTGGGGCCGTGCATACCCGGGGTCTTGACTTCGCCTGCGATATCTA |
| | | CATTTGGGCCCCTCTGGCTGGTACTTGCGGGGTCCTGCTGCTTTCACTCGTGATCACTCTTTACTGTAAGCGCGGTCGGA |
| | | AGAAGCTGCTGTACATCTTTAAGCAACCCTTCATGAGGCCTGTGCAGACTACTCAAGAGGAGGACGGCTGTTCATGCCGG |
| | | TTCCCAGAGGAGGAGGAAGGCGGCTGCGAACTGCGCGTGAAATTCAGCCGCAGCGCAGATGCTCCAGCCTACAAGCAGGG |
| | | GCAGAACCAGCTCTACAACGAACTCAATCTTGGTCGGAGAGAGGAGTACGACGTGCTGGACAAGCGGAGAGGACGGGACC |
| | | CAGAAATGGGCGGGAAGCCGCGCAGAAAGAATCCCCAAGAGGGCCTGTACAACGAGCTCCAAAAGGATAAGATGGCAGAA |
| | | GCCTATAGCGAGATTGGTATGAAAGGGGAACGCAGAAGAGGCAAAGGCCACGACGGACTGTACCAGGGACTCAGCACCGC |
| | | CACCAAGGACACCTATGACGCTCTTCACATGCAGGCCCTGCCGCCTCGG |
| 517 | M23 | CAAGTCCAACTCCAGCAATCGGGAGCAGAAGTCAAGAAACCAGGCGCATCGGTGAAAGTGTCGTGTAAGGCGTCAGGGTA |
| | (ScFv | CACCTTCACCAACTACTAT |
| | domain) | ATGCACTGGGTGCGCCAGGCTCCAGGCCAGGGGTTGGAGTGGATGGGGATCATCAATCCGTCAGGTGGCTACACCACTTA |
| | >XH66- | CGCTCAGAAGTTCCAGGGACGCCTCACTATGACTCGCGATACTAGCACCTCCACGGTGTACATGGAACTGTCATCGCTGA |
| | 84HE | GGTCCGAAGATACCGCCGTCTACTACTGCGCACGGATCAGATCCTGCGGAGGAGATTGTTACTACTTTGACAACTGGGGA |
| | (M23) | CAGGGCACCCTTGTTACTGTGTCATCGGGAGGAGGGGGAAGCGGAGGAGGTGGATCAGGCGGCGGTGGCAGCGGGGGCGG |
| | | AGGATCGGACATTCAGCTGACTCAGTCCCCCTCCACTTTGTCGGCCAGCGTGGGAGACAGAGTGACCATCACTTGCCGGG |
| | | CGTCCGAGAACGTCAATATCTGGCTGGCCTGGTACCAGCAAAAGCCTGGAAAAGCCCCGAAGCTGCTCATCTATAAGTCA |
| | | TCCAGCCTGGCGTCTGGTGTGCCGTCGCGGTTCTCCGGCAGCGGGAGCGGAGCCGAGTTCACTCTCACCATTTCGAGCCT |
| | | TCAACCGGACGATTTCGCCACCTACTACTGCCAGCAGTACCAATCCTACCCTCTGACGTTTGGAGGTGGAACCAAGGTGG |
| | | ACATCAAG |
| 518 | M23 | ATGGCCCTCCCTGTCACCGCCCTGCTGCTTCCGCTGGCTCTTCTGCTCCACGCCGCTCGGCCCCAAGTCCAACTCCAGCA |
| | (Full) | ATCGGGAGCAGAAGTCAAGAAACCAGGCGCATCGGTGAAAGTGTCGTGTAAGGCGTCAGGGTACACCTTCACCAACTACT |
| | >XH66- | AT |
| | 84HE | ATGCACTGGGTGCGCCAGGCTCCAGGCCAGGGGTTGGAGTGGATGGGGATCATCAATCCGTCAGGTGGCTACACCACTTA |
| | (M23) | CGCTCAGAAGTTCCAGGGACGCCTCACTATGACTCGCGATACTAGCACCTCCACGGTGTACATGGAACTGTCATCGCTGA |
| | | GGTCCGAAGATACCGCCGTCTACTACTGCGCACGGATCAGATCCTGCGGAGGAGATTGTTACTACTTTGACAACTGGGGA |
| | | CAGGGCACCCTTGTTACTGTGTCATCGGGAGGAGGGGGAAGCGGAGGAGGTGGATCAGGCGGCGGTGGCAGCGGGGGCGG |
| | | AGGATCGGACATTCAGCTGACTCAGTCCCCCTCCACTTTGTCGGCCAGCGTGGGAGACAGAGTGACCATCACTTGCCGGG |
| | | CGTCCGAGAACGTCAATATCTGGCTGGCCTGGTACCAGCAAAAGCCTGGAAAAGCCCCGAAGCTGCTCATCTATAAGTCA |
| | | TCCAGCCTGGCGTCTGGTGTGCCGTCGCGGTTCTCCGGCAGCGGGAGCGGAGCCGAGTTCACTCTCACCATTTCGAGCCT |
| | | TCAACCGGACGATTTCGCCACCTACTACTGCCAGCAGTACCAATCCTACCCTCTGACGTTTGGAGGTGGAACCAAGGTGG |
| | | ACATCAAGACCACTACCCCAGCACCGAGGCCACCCACCCCGGCTCCTACCATCGCCTCCCAGCCTCTGTCCCTGCGTCCG |
| | | GAGGCATGTAGACCCGCAGCTGGTGGGGCCGTGCATACCCGGGGTCTTGACTTCGCCTGCGATATCTACATTTGGGCCCC |
| | | TCTGGCTGGTACTTGCGGGGTCCTGCTGCTTTCACTCGTGATCACTCTTTACTGTAAGCGCGGTCGGAAGAAGCTGCTGT |
| | | ACATCTTTAAGCAACCCTTCATGAGGCCTGTGCAGACTACTCAAGAGGAGGACGGCTGTTCATGCCGGTTCCCAGAGGAG |
| | | GAGGAAGGCGGCTGCGAACTGCGCGTGAAATTCAGCCGCAGCGCAGATGCTCCAGCCTACAAGCAGGGGCAGAACCAGCT |
| | | CTACAACGAACTCAATCTTGGTCGGAGAGAGGAGTACGACGTGCTGGACAAGCGGAGAGGACGGGACCCAGAAATGGGCG |
| | | GGAAGCCGCGCAGAAAGAATCCCCAAGAGGGCCTGTACAACGAGCTCCAAAAGGATAAGATGGCAGAAGCCTATAGCGAG |
| | | ATTGGTATGAAAGGGGAACGCAGAAGAGGCAAAGGCCACGACGGACTGTACCAGGGACTCAGCACCGCCACCAAGGACAC |
| | | CTATGACGCTCTTCACATGCAGGCCCTGCCGCCTCGG |
| 519 | M24 | CAAATCACTCTGAAAGAA |
| | (ScFv | TCTGGACCGGCCCTGGTTAAGCCGACTCAAACGCTCACCCTTACTTGCACCTTCAGCGGATTCTCACTCAGCACTGCTGG |
| | domain) | TGTGCACGTCGGATGGATTAGACAGCCGCCTGGAAAGGCCCTGGAATGGCTCGCCCTCATCTCCTGGGCCGATGACAAGA |
| | >NH67- | GATACAGGCCCTCGCTTCGATCCCGGTTGGACATTACCCGGGTGACCTCGAAAGATCAGGTGGTGCTCTCAATGACCAAT |
| | 89CE | ATGCAGCCGGAGGACACCGCTACGTACTACTGCGCACTGCAAGGATTTGACGGCTACGAGGCTAACTGGGGACCAGGTAC |
| | (M24) | TCTGGTCACCGTGAGCTCCGGCGGGGGAGGATCAGGCGGGGGGGGGTCAGGAGGCGGAGGCTCCGGTGGAGGAGGATCGG |
| | | ATATCGTCATGACCCAGTCCCCAAGCTCGCTGAGCGCGTCAGCGGGCGACCGCGTGACTATCACTTGCCGGGCCAGCCGC |
| | | GGCATCTCCTCCGCACTGGCGTGGTACCAGCAGAAGCCTGGAAAACCGCCAAAGCTCCTGATCTATGATGCCTCCAGCCT |
| | | GGAGTCAGGTGTCCCCAGCCGCTTCTCGGGTTCGGGCTCGGGAACCGACTTCACTTTGACCATCGACTCGCTGGAACCGG |
| | | AAGATTTCGCAACCTACTACTGTCAGCAGTCCTACTCGACCCCTTGGACTTTTGGACAAGGGACGAAGGTGGACATCAAG |
| 520 | M24 | ATGGCCCTCCCTGTCACCGCCCTGCTGCTTCCGCTGGCTCTTCTGCTCCACGCCGCTCGGCCCCAAATCACTCTGAAAGA |
| | (Full) | A |
| | >NH67- | TCTGGACCGGCCCTGGTTAAGCCGACTCAAACGCTCACCCTTACTTGCACCTTCAGCGGATTCTCACTCAGCACTGCTGG |
| | 89CE | TGTGCACGTCGGATGGATTAGACAGCCGCCTGGAAAGGCCCTGGAATGGCTCGCCCTCATCTCCTGGGCCGATGACAAGA |
| | (M24) | GATACAGGCCCTCGCTTCGATCCCGGTTGGACATTACCCGGGTGACCTCGAAAGATCAGGTGGTGCTCTCAATGACCAAT |
| | | ATGCAGCCGGAGGACACCGCTACGTACTACTGCGCACTGCAAGGATTTGACGGCTACGAGGCTAACTGGGGACCAGGTAC |
| | | TCTGGTCACCGTGAGCTCCGGCGGGGGAGGATCAGGCGGGGGGGGGTCAGGAGGCGGAGGCTCCGGTGGAGGAGGATCGG |
| | | ATATCGTCATGACCCAGTCCCCAAGCTCGCTGAGCGCGTCAGCGGGCGACCGCGTGACTATCACTTGCCGGGCCAGCCGC |
| | | GGCATCTCCTCCGCACTGGCGTGGTACCAGCAGAAGCCTGGAAAACCGCCAAAGCTCCTGATCTATGATGCCTCCAGCCT |
| | | GGAGTCAGGTGTCCCCAGCCGCTTCTCGGGTTCGGGCTCGGGAACCGACTTCACTTTGACCATCGACTCGCTGGAACCGG |
| | | AAGATTTCGCAACCTACTACTGTCAGCAGTCCTACTCGACCCCTTGGACTTTTGGACAAGGGACGAAGGTGGACATCAAG |
| | | ACCACTACCCCAGCACCGAGGCCACCCACCCCGGCTCCTACCATCGCCTCCCAGCCTCTGTCCCTGCGTCCGGAGGCATG |
| | | TAGACCCGCAGCTGGTGGGGCCGTGCATACCCGGGGTCTTGACTTCGCCTGCGATATCTACATTTGGGCCCCTCTGGCTG |
| | | GTACTTGCGGGGTCCTGCTGCTTTCACTCGTGATCACTCTTTACTGTAAGCGCGGTCGGAAGAAGCTGCTGTACATCTTT |
| | | AAGCAACCCTTCATGAGGCCTGTGCAGACTACTCAAGAGGAGGACGGCTGTTCATGCCGGTTCCCAGAGGAGGAGGAAGG |
| | | CGGCTGCGAACTGCGCGTGAAATTCAGCCGCAGCGCAGATGCTCCAGCCTACAAGCAGGGGCAGAACCAGCTCTACAACG |
| | | AACTCAATCTTGGTCGGAGAGAGGAGTACGACGTGCTGGACAAGCGGAGAGGACGGGACCCAGAAATGGGCGGGAAGCCG |
| | | CGCAGAAAGAATCCCCAAGAGGGCCTGTACAACGAGCTCCAAAAGGATAAGATGGCAGAAGCCTATAGCGAGATTGGTAT |
| | | GAAAGGGGAACGCAGAAGAGGCAAAGGCCACGACGGACTGTACCAGGGACTCAGCACCGCCACCAAGGACACCTATGACG |
| | | CTCTTCACATGCAGGCCCTGCCGCCTCGG |
| 521 | Ss1 | CAAGTCCAGCTCCAGCAGTCGGGCCCAGAGTTGGAGAAGCCTGGGGCGAGCGTGA |
| | (scFv | AGAT |
| | domain) | CTCATGCAAAGCCTCAGGCTACTCCTTTACTGGATACACGATGAATTGGGTGAAAC |
| | | AGT |
| | | CGCATGGAAAGTCACTGGAATGGATCGGTCTGATTACGCCCTACAACGGCGCCTCC |
| | | AGC |
| | | TACAACCAGAAGTTCAGGGGAAAGGCGACCCTTACTGTCGACAAGTCGTCAAGCA |
| | | CCGC |
| | | CTACATGGACCTCCTGTCCCTGACCTCCGAAGATAGCGCGGTCTACTTTTGTGCACG |
| | | CG |
| | | GAGGTTACGATGGACGGGGATTCGACTACTGGGGCCAGGGAACCACTGTCACCGT |
| | | GTCG |
| | | AGCGGAGGCGGAGGGAGCGGAGGAGGAGGCAGCGGAGGTGGAGGGTCGGATATC |
| | | GAACT |
| | | CACTCAGTCCCCAGCAATCATGTCCGCTTCACCGGGAGAAAAGGTGACCATGACTT |
| | | GCT |
| | | CGGCCTCCTCGTCCGTGTCATACATGCACTGGTACCAACAAAAATCGGGGACCTCC |
| | | CCT |
| | | AAGAGATGGATCTACGATACCAGCAAACTGGCTTCAGGCGTGCCGGGACGCTTCTC |
| | | GGG |
| | | TTCGGGGAGCGGAAATTCGTATTCGTTGACCATTTCGTCCGTGGAAGCCGAGGACG |
| | | ACG |
| | | CAACTTATTACTGCCAACAGTGGTCAGGCTACCCGCTCACTTTCGGAGCCGGCACT |
| | | AAG |
| | | CTGGAGATC |
| 522 | Ss1 | ATGGCCCTCCCTGTCACCGCCCTGCTGCTTCCGCTGGCTCTTCTGCTCCACGCCGCTCG |
| | (full) | GCCCCAAGTCCAGCTCCAGCAGTCGGGCCCAGAGTTGGAGAAGCCTGGGGCGAGCGTGA |
| | | AGATCTCATGCAAAGCCTCAGGCTACTCCTTTACTGGATACACGATGAATTGGGTGAAA |
| | | CAGTCGCATGGAAAGTCACTGGAATGGATCGGTCTGATTACGCCCTACAACGGCGCCTC |
| | | CAGCTACAACCAGAAGTTCAGGGGAAAGGCGACCCTTACTGTCGACAAGTCGTCAAGCA |
| | | CCGCCTACATGGACCTCCTGTCCCTGACCTCCGAAGATAGCGCGGTCTACTTTTGTGCA |
| | | CGCGGAGGTTACGATGGACGGGGATTCGACTACTGGGGCCAGGGAACCACTGTCACCGT |
| | | GTCGAGCGGAGGCGGAGGGAGCGGAGGAGGAGGCAGCGGAGGTGGAGGGTCGGATATCG |
| | | AACTCACTCAGTCCCCAGCAATCATGTCCGCTTCACCGGGAGAAAAGGTGACCATGACT |
| | | TGCTCGGCCTCCTCGTCCGTGTCATACATGCACTGGTACCAACAAAAATCGGGGACCTC |
| | | CCCTAAGAGATGGATCTACGATACCAGCAAACTGGCTTCAGGCGTGCCGGGACGCTTCT |
| | | CGGGTTCGGGGAGCGGAAATTCGTATTCGTTGACCATTTCGTCCGTGGAAGCCGAGGAC |
| | | GACGCAACTTATTACTGCCAACAGTGGTCAGGCTACCCGCTCACTTTCGGAGCCGGCAC |
| | | TAAGCTGGAGATCACCACTACCCCAGCACCGAGGCCACCCACCCCGGCTCCTACCATCG |
| | | CCTCCCAGCCTCTGTCCCTGCGTCCGGAGGCATGTAGACCCGCAGCTGGTGGGGCCGTG |
| | | CATACCCGGGGTCTTGACTTCGCCTGCGATATCTACATTTGGGCCCCTCTGGCTGGTAC |
| | | TTGCGGGGTCCTGCTGCTTTCACTCGTGATCACTCTTTACTGTAAGCGCGGTCGGAAGA |
| | | AGCTGCTGTACATCTTTAAGCAACCCTTCATGAGGCCTGTGCAGACTACTCAAGAGGAG |
| | | GACGGCTGTTCATGCCGGTTCCCAGAGGAGGAGGAAGGCGGCTGCGAACTGCGCGTGAA |
| | | ATTCAGCCGCAGCGCAGATGCTCCAGCC |

[0490] In one embodiment, an antigen binding domain against CD123 is an antigen binding portion, e.g., CDRs, of an antibody, antigen-binding fragment or CAR described in, e.g., PCT publication WO2016/028896. In one embodiment, an antigen binding domain against CD123 is an antigen binding portion, e.g., CDRs, of an antibody, antigen-binding fragment or CAR described in, e.g., PCT publication WO2014/130635. In one embodiment, an antigen binding domain against CD123 is an antigen binding portion, e.g., CDRs, of an antibody, antigen-binding fragment, or CAR described in, e.g., PCT publication WO2014/138805, WO2014/138819, WO2013/173820, WO2014/144622, WO2001/66139, WO2010/126066, WO2014/144622, or US2009/0252742.

[0491] In one embodiment, an antigen binding domain against CD123 is an antigen binding portion, e.g., CDRs, of an antibody, antigen-binding fragment or CAR described in, e.g., US2014/0322212A1 or US2016/0068601A1, both incorporated herein by reference. In embodiments, the CD123 CAR comprises an amino acid, or has a nucleotide sequence shown in US2014/0322212A1 or US2016/0068601A1, both incorporated herein by reference, or a sequence substantially identical to any of the aforesaid sequences (e.g., at least 85%, 90%, 95% or more identical to any of the aforesaid CD123 CAR sequences). In one embodiment, the CAR molecule comprises a CD123 CAR (e.g., any of the CAR1-CAR8), or an antigen binding domain according to Tables 1-2 of WO 2014/130635, incorporated herein by reference, or a sequence substantially identical thereto (e.g., at least 85%, 90%, 95% or more identical to any of the aforesaid CD123 CAR sequences). The amino acid and nucleotide sequences encoding the CD123 CAR molecules and antigen binding domains (e.g., including one, two, three VH CDRs; and one, two, three VL CDRs according to Kabat or Chothia), are specified in WO 2014/130635.

[0492] In other embodiments, the CAR molecule comprises a CD123 CAR comprises a CAR molecule (e.g., any of the CAR123-1 to CAR123-4 and hzCAR123-1 to hzCAR123-32), or an antigen binding domain according to Tables 2, 6, and 9 of WO2016/028896, incorporated herein by reference, or a sequence substantially identical thereto (e.g., at least 85%, 90%, 95% or more identical to any of the aforesaid CD123 CAR sequences). The amino acid and nucleotide sequences encoding the CD123 CAR molecules and antigen binding domains (e.g., including one, two, three VH CDRs; and one, two, three VL CDRs according to Kabat or Chothia), are specified in WO2016/028896.

[0493] In one embodiment, an antigen binding domain against CD22 is an antigen binding portion, e.g., CDRs, of an antibody described in, e.g., Haso et al., Blood, 121(7): 1165-1174 (2013); Wayne et al., Clin Cancer Res 16(6): 1894-1903 (2010); Kato et al., Leuk Res 37(1):83-88 (2013); Creative BioMart (creativebiomart.net): MOM-18047-5(P).

[0494] In one embodiment, an antigen binding domain against CS-1 is an antigen binding portion, e.g., CDRs, of Elotuzumab (BMS), see e.g., Tai et al., 2008, Blood 112(4):1329-37; Tai et al., 2007, Blood. 110(5):1656-63.

[0495] In one embodiment, an antigen binding domain against CLL-1 is an antigen binding portion, e.g., CDRs, of an antibody available from R&D, ebiosciences, Abcam, for example, PE-CLL1-hu Cat #353604 (BioLegend); and PE-CLL1 (CLEC12A) Cat #562566 (BD).

[0496] In other embodiments, the CLL1 CAR includes a CAR molecule, or an antigen binding domain according to Table 2 of WO2016/014535, incorporated herein by reference. The amino acid and nucleotide sequences encoding the CLL-1 CAR molecules and antigen binding domains (e.g., including one, two, three VH CDRs; and one, two, three VL CDRs according to Kabat or Chothia), are specified in WO2016/014535.

[0497] In one embodiment, an antigen binding domain against CD33 is an antigen binding portion, e.g., CDRs, of an antibody described in, e.g., Bross et al., Clin Cancer Res 7(6):1490-1496 (2001) (Gemtuzumab Ozogamicin, hP67.6),Caron et al., Cancer Res 52(24):6761-6767 (1992) (Lintuzumab, HuM195), Lapusan et al., Invest New Drugs 30(3):1121-1131 (2012) (AVE9633), Aigner et al., Leukemia 27(5): 1107-1115 (2013) (AMG330, CD33 BiTE), Dutour et al., Adv hematol 2012:683065 (2012), and Pizzitola et al., Leukemia doi:10.1038/Lue.2014.62 (2014).

[0498] In one embodiment, an antigen binding domain against CD33 is an antigen binding portion, e.g., CDRs, of an antibody described in, US2016/0096892A1, incorporated herein by reference. In embodiments, the CD33 CAR comprises an amino acid, or has a nucleotide sequence shown in US2016/0096892A1, incorporated herein by reference, or a sequence substantially identical to any of the aforesaid sequences (e.g., at least 85%, 90%, 95% or more identical to any of the aforesaid CD33 CAR sequences). In other embodiments, the CD33 CAR CAR or antigen binding domain thereof can include a CAR molecule (e.g., any of CAR33-1 to CAR-33-9), or an antigen binding domain according to Table 2 or 9 of WO2016/014576, incorporated herein by reference, or a sequence substantially identical to any of the aforesaid sequences (e.g., at least 85%, 90%, 95% or more identical to any of the aforesaid CD33 CAR sequences). The amino acid and nucleotide sequences encoding the CD33 CAR molecules and antigen binding domains (e.g., including one, two, three VH CDRs; and one, two, three VL CDRs according to Kabat or Chothia), are specified in WO2016/014576.

[0499] In one embodiment, an antigen binding domain against GD2 is an antigen binding portion, e.g., CDRs, of an antibody described in, e.g., Mujoo et al., Cancer Res. 47(4):1098-1104 (1987); Cheung et al., Cancer Res 45(6):2642-2649 (1985), Cheung et al., J Clin Oncol 5(9):1430-1440 (1987), Cheung et al., J Clin Oncol 16(9):3053-3060 (1998), Handgretinger et al., Cancer Immunol Immunother 35(3):199-204 (1992). In some embodiments, an antigen binding domain against GD2 is an antigen binding portion of an antibody selected from mAb 14.18, 14G2a, ch14.18, hu14.18, 3F8, hu3F8, 3G6, 8B6, 60C3, 10B8, ME36.1, and 8H9, see e.g., WO2012033885, WO2013040371, WO2013192294, WO2013061273, WO2013123061, WO2013074916, and WO201385552. In some embodiments, an antigen binding domain against GD2 is an antigen binding portion of an antibody described in US Publication No.: 20100150910 or PCT Publication No.: WO 2011160119.

[0500] In one embodiment, an antigen binding domain against BCMA is an antigen binding portion, e.g., CDRs, of an antibody, antigen-binding fragment or CAR described in, e.g., PCT publication WO2016/014565, e.g., the antigen binding portion of CAR BCMA-10 as described in WO2016/014565. In one embodiment, an antigen binding domain against BCMA is an antigen binding portion, e.g., CDRs, of an antibody, antigen-binding fragment or CAR described in, e.g., PCT publication WO2016/014789. In one embodiment, an antigen binding domain against BCMA is an antigen binding portion, e.g., CDRs, of an antibody described in, e.g., WO2012/163805, WO2001/12812, and WO2003/062401.

[0501] In other embodiment, the CAR molecule comprises a BCMA CAR molecule, or an antigen binding domain against BCMA described herein, e.g., a BCMA CAR described in US-2016-0046724-A1 or WO2016/014565. In embodiments, the BCMA CAR comprises an amino acid, or has a nucleotide sequence of a CAR molecule, or an antigen binding domain according to US-2016-0046724-A1, or Table 1 or 16, SEQ ID NO: 271 or SEQ ID NO: 273 of WO2016/014565, incorporated herein by reference, or a sequence substantially identical to any of the aforesaid sequences (e.g., at least 85%, 90%, 95% or more identical to any of the aforesaid BCMA CAR sequences). The amino acid and nucleotide sequences encoding the BCMA CAR molecules and antigen binding domains (e.g., including one, two, three VH CDRs; and one, two, three VL CDRs according to Kabat or Chothia), are specified in WO2016/014565.

[0502] In one embodiment, an antigen binding domain against GFR ALPHA-4 CAR antigen is an antigen binding portion, e.g., CDRs, of an antibody described in, e.g., WO2016/025880, incorporated herein by reference. In one embodiment, the CAR molecule comprises an a GFR ALPHA-4 CAR, e.g., a CAR molecule, or an antigen binding domain according to Table 2 of WO2016/025880, incorporated herein by reference, or a sequence substantially identical to any of the aforesaid sequences (e.g., at least 85%, 90%, 95% or more identical to any of the aforesaid GFR ALPHA-4 sequences). The amino acid and nucleotide sequences encoding the GFR ALPHA-4 CAR molecules and antigen binding domains (e.g., including one, two, three VH CDRs; and one, two, three VL CDRs according to Kabat or Chothia), are specified in WO2016/025880.

[0503] In one embodiment, an antigen binding domain against Tn antigen is an antigen binding portion, e.g., CDRs, of an antibody described in, e.g., U.S. Pat. No. 8,440,798; Brooks et al., PNAS 107(22):10056-10061 (2010), and Stone et al., OncoImmunology 1(6):863-873(2012).

[0504] In one embodiment, an antigen binding domain against PSMA is an antigen binding portion, e.g., CDRs, of an antibody described in, e.g., Parker et al., Protein Expr Purif 89(2):136-145 (2013), US 20110268656 (J591 ScFv); Frigerio et al, European J Cancer 49(9):2223-2232 (2013) (scFvD2B); WO 2006125481 (mAbs 3/A12, 3/E7 and 3/F11) and single chain antibody fragments (scFv A5 and D7).

[0505] In one embodiment, an antigen binding domain against ROR1 is an antigen binding portion, e.g., CDRs, of an antibody described in, e.g., Hudecek et al., Clin Cancer Res 19(12):3153-3164 (2013); WO 2011159847; and US20130101607.

[0506] In one embodiment, an antigen binding domain against FLT3 is an antigen binding portion, e.g., CDRs, of an antibody described in, e.g., WO2011076922, U.S. Pat. No. 5,777,084, EP0754230, US20090297529, and several commercial catalog antibodies (R&D, ebiosciences, Abcam).

[0507] In one embodiment, an antigen binding domain against TAG72 is an antigen binding portion, e.g., CDRs, of an antibody described in, e.g., Hombach et al., Gastroenterology 113(4):1163-1170 (1997); and Abcam ab691.

[0508] In one embodiment, an antigen binding domain against FAP is an antigen binding portion, e.g., CDRs, of an antibody described in, e.g., Ostermann et al., Clinical Cancer Research 14:4584-4592 (2008) (FAP5), US Pat. Publication No. 2009/0304718; sibrotuzumab (see e.g., Hofheinz et al., Oncology Research and Treatment 26(1), 2003); and Tran et al., J Exp Med 210(6):1125-1135 (2013).

[0509] In one embodiment, an antigen binding domain against CD38 is an antigen binding portion, e.g., CDRs, of daratumumab (see, e.g., Groen et al., Blood 116(21):1261-1262 (2010); MOR202 (see, e.g., U.S. Pat. No. 8,263,746); or antibodies described in U.S. Pat. No. 8,362,211.

[0510] In one embodiment, an antigen binding domain against CD44v6 is an antigen binding portion, e.g., CDRs, of an antibody described in, e.g., Casucci et al., Blood 122(20):3461-3472 (2013).

[0511] In one embodiment, an antigen binding domain against CEA is an antigen binding portion, e.g., CDRs, of an antibody described in, e.g., Chmielewski et al., Gastoenterology 143(4):1095-1107 (2012).

[0512] In one embodiment, an antigen binding domain against EPCAM is an antigen binding portion, e.g., CDRS, of an antibody selected from MT110, EpCAM-CD3 bispecific Ab (see, e.g., clinicaltrials.gov/ct2/show/NCT00635596); Edrecolomab; 3622W94; ING-1; and adecatumumab (MT201).

[0513] In one embodiment, an antigen binding domain against PRSS21 is an antigen binding portion, e.g., CDRs, of an antibody described in U.S. Pat. No. 8,080,650.

[0514] In one embodiment, an antigen binding domain against B7H3 is an antigen binding portion, e.g., CDRs, of an antibody MGA271 (Macrogenics).

[0515] In one embodiment, an antigen binding domain against KIT is an antigen binding portion, e.g., CDRs, of an antibody described in, e.g., U.S. Pat. No. 7,915,391, US20120288506, and several commercial catalog antibodies.

[0516] In one embodiment, an antigen binding domain against IL-13Ra2 is an antigen binding portion, e.g., CDRs, of an antibody described in, e.g., WO2008/146911, WO2004087758, several commercial catalog antibodies, and WO2004087758.

[0517] In one embodiment, an antigen binding domain against CD30 is an antigen binding portion, e.g., CDRs, of an antibody described in, e.g., U.S. Pat. No. 7,090,843 B1, and EP0805871.

[0518] In one embodiment, an antigen binding domain against GD3 is an antigen binding portion, e.g., CDRs, of an antibody described in, e.g., U.S. Pat. Nos. 7,253,263; 8,207,308; US 20120276046; EP1013761; WO2005035577; and U.S. Pat. No. 6,437,098.

[0519] In one embodiment, an antigen binding domain against CD171 is an antigen binding portion, e.g., CDRs, of an antibody described in, e.g., Hong et al., J Immunother 37(2):93-104 (2014).

[0520] In one embodiment, an antigen binding domain against IL-11Ra is an antigen binding portion, e.g., CDRs, of an antibody available from Abcam (cat #ab55262) or Novus Biologicals (cat #EPR5446). In another embodiment, an antigen binding domain again IL-11Ra is a peptide, see, e.g., Huang et al., Cancer Res 72(1):271-281 (2012).

[0521] In one embodiment, an antigen binding domain against PSCA is an antigen binding portion, e.g., CDRs, of an antibody described in, e.g., Morgenroth et al., Prostate 67(10):1121-1131 (2007) (scFv 7F5); Nejatollahi et al., J of Oncology 2013(2013), article ID 839831 (scFv C5-II); and US Pat Publication No. 20090311181.

[0522] In one embodiment, an antigen binding domain against VEGFR2 is an antigen binding portion, e.g., CDRs, of an antibody described in, e.g., Chinnasamy et al., J Clin Invest 120(11):3953-3968 (2010).

[0523] In one embodiment, an antigen binding domain against LewisY is an antigen binding portion, e.g., CDRs, of an antibody described in, e.g., Kelly et al., Cancer Biother Radiopharm 23(4):411-423 (2008) (hu3S193 Ab (scFvs)); Dolezal et al., Protein Engineering 16(1):47-56 (2003) (NC10 scFv).

[0524] In one embodiment, an antigen binding domain against CD24 is an antigen binding portion, e.g., CDRs, of an antibody described in, e.g., Maliar et al., Gastroenterology 143(5):1375-1384 (2012).

[0525] In one embodiment, an antigen binding domain against PDGFR-beta is an antigen binding portion, e.g., CDRs, of an antibody Abcam ab32570.

[0526] In one embodiment, an antigen binding domain against SSEA-4 is an antigen binding portion, e.g., CDRs, of antibody MC813 (Cell Signaling), or other commercially available antibodies.

[0527] In one embodiment, an antigen binding domain against CD20 is an antigen binding portion, e.g., CDRs, of the antibody Rituximab, Ofatumumab, Ocrelizumab, Veltuzumab, or GA101.

[0528] In one embodiment, an antigen binding domain against Folate receptor alpha is an antigen binding portion, e.g., CDRs, of the antibody IMGN853, or an antibody described in US20120009181; U.S. Pat. No. 4,851,332, LK26: U.S. Pat. No. 5,952,484.

[0529] In one embodiment, an antigen binding domain against ERBB2 (Her2/neu) is an antigen binding portion, e.g., CDRs, of the antibody trastuzumab, or pertuzumab.

[0530] In one embodiment, an antigen binding domain against MUC1 is an antigen binding portion, e.g., CDRs, of the antibody SAR566658.

[0531] In one embodiment, the antigen binding domain against EGFR is antigen binding portion, e.g., CDRs, of the antibody cetuximab, panitumumab, zalutumumab, nimotuzumab, or matuzumab.

[0532] In one embodiment, an antigen binding domain against NCAM is an antigen binding portion, e.g., CDRs, of the antibody clone 2-2B: MAB5324 (EMD Millipore).

[0533] In one embodiment, an antigen binding domain against Ephrin B2 is an antigen binding portion, e.g., CDRs, of an antibody described in, e.g., Abengozar et al., Blood 119(19):4565-4576 (2012).

[0534] In one embodiment, an antigen binding domain against IGF-I receptor is an antigen binding portion, e.g., CDRs, of an antibody described in, e.g., U.S. Pat. No. 8,344,112 B2; EP2322550 A1; WO 2006/138315, or PCT/US2006/022995.

[0535] In one embodiment, an antigen binding domain against CAIX is an antigen binding portion, e.g., CDRs, of the antibody clone 303123 (R&D Systems).

[0536] In one embodiment, an antigen binding domain against LMP2 is an antigen binding portion, e.g., CDRs, of an antibody described in, e.g., U.S. Pat. No. 7,410,640, or US20050129701.

[0537] In one embodiment, an antigen binding domain against gp100 is an antigen binding portion, e.g., CDRs, of the antibody HMB45, NKIbetaB, or an antibody described in WO2013165940, or US20130295007

[0538] In one embodiment, an antigen binding domain against tyrosinase is an antigen binding portion, e.g., CDRs, of an antibody described in, e.g., U.S. Pat. No. 5,843,674; or US19950504048.

[0539] In one embodiment, an antigen binding domain against EphA2 is an antigen binding portion, e.g., CDRs, of an antibody described in, e.g., Yu et al., Mol Ther 22(1):102-111 (2014).

[0540] In one embodiment, an antigen binding domain against GD3 is an antigen binding portion, e.g., CDRs, of an antibody described in, e.g., U.S. Pat. Nos. 7,253,263; 8,207,308; US 20120276046; EP1013761 A3; 20120276046; WO2005035577; or U.S. Pat. No. 6,437,098.

[0541] In one embodiment, an antigen binding domain against fucosyl GM1 is an antigen binding portion, e.g., CDRs, of an antibody described in, e.g., US20100297138; or WO2007/067992.

[0542] In one embodiment, an antigen binding domain against sLe is an antigen binding portion, e.g., CDRs, of the antibody G193 (for lewis Y), see Scott A M et al, Cancer Res 60: 3254-61 (2000), also as described in Neeson et al, J Immunol May 2013 190 (Meeting Abstract Supplement) 177.10.

[0543] In one embodiment, an antigen binding domain against GM3 is an antigen binding portion, e.g., CDRs, of the antibody CA 2523449 (mAb 14F7).

[0544] In one embodiment, an antigen binding domain against HMWMAA is an antigen binding portion, e.g., CDRs, of an antibody described in, e.g., Kmiecik et al., Oncoimmunology 3(1):e27185 (2014) (PMID: 24575382) (mAb9.2.27); U.S. Pat. No. 6,528,481; WO2010033866; or US 20140004124.

[0545] In one embodiment, an antigen binding domain against o-acetyl-GD2 is an antigen binding portion, e.g., CDRs, of the antibody 8B6.

[0546] In one embodiment, an antigen binding domain against TEM1/CD248 is an antigen binding portion, e.g., CDRs, of an antibody described in, e.g., Marty et al., Cancer Lett 235(2):298-308 (2006); Zhao et al., J Immunol Methods 363(2):221-232 (2011).

[0547] In one embodiment, an antigen binding domain against CLDN6 is an antigen binding portion, e.g., CDRs, of the antibody IMAB027 (Ganymed Pharmaceuticals), see e.g., clinicaltrial.gov/show/NCT02054351.

[0548] In one embodiment, an antigen binding domain against TSHR is an antigen binding portion, e.g., CDRs, of an antibody described in, e.g., U.S. Pat. Nos. 8,603,466; 8,501,415; or U.S. Pat. No. 8,309,693.

[0549] In one embodiment, an antigen binding domain against GPRC5D is an antigen binding portion, e.g., CDRs, of the antibody FAB6300A (R&D Systems); or LS-A4180 (Lifespan Biosciences).

[0550] In one embodiment, an antigen binding domain against CD97 is an antigen binding portion, e.g., CDRs, of an antibody described in, e.g., U.S. Pat. No. 6,846,911; de Groot et al., J Immunol 183(6):4127-4134 (2009); or an antibody from R&D:MAB3734.

[0551] In one embodiment, an antigen binding domain against ALK is an antigen binding portion, e.g., CDRs, of an antibody described in, e.g., Mino-Kenudson et al., Clin Cancer Res 16(5):1561-1571 (2010).

[0552] In one embodiment, an antigen binding domain against polysialic acid is an antigen binding portion, e.g., CDRs, of an antibody described in, e.g., Nagae et al., J Biol Chem 288(47):33784-33796 (2013).

[0553] In one embodiment, an antigen binding domain against PLAC1 is an antigen binding portion, e.g., CDRs, of an antibody described in, e.g., Ghods et al., Biotechnol Appl Biochem 2013 doi:10.1002/bab.1177.

[0554] In one embodiment, an antigen binding domain against GloboH is an antigen binding portion of the antibody VK9; or an antibody described in, e.g., Kudryashov V et al, Glycoconj J. 15(3):243-9 (1998), Lou et al., Proc Natl Acad Sci USA 111(7):2482-2487 (2014); MBrl: Bremer E-G et al. J Biol Chem 259:14773-14777 (1984).

[0555] In one embodiment, an antigen binding domain against NY—BR-1 is an antigen binding portion, e.g., CDRs of an antibody described in, e.g., Jager et al., Appl Immunohistochem Mol Morphol 15(1):77-83 (2007).

[0556] In one embodiment, an antigen binding domain against WT-1 is an antigen binding portion, e.g., CDRs, of an antibody described in, e.g., Dao et al., Sci Transl Med 5(176):176ra33 (2013); or WO2012/135854.

[0557] In one embodiment, an antigen binding domain against MAGE-A1 is an antigen binding portion, e.g., CDRs, of an antibody described in, e.g., Willemsen et al., J Immunol 174(12):7853-7858 (2005) (TCR-like scFv).

[0558] In one embodiment, an antigen binding domain against sperm protein 17 is an antigen binding portion, e.g., CDRs, of an antibody described in, e.g., Song et al., Target Oncol 2013 Aug. 14 (PMID: 23943313); Song et al., Med Oncol 29(4):2923-2931 (2012).

[0559] In one embodiment, an antigen binding domain against Tie 2 is an antigen binding portion, e.g., CDRs, of the antibody AB33 (Cell Signaling Technology).

[0560] In one embodiment, an antigen binding domain against MAD-CT-2 is an antigen binding portion, e.g., CDRs, of an antibody described in, e.g., PMID: 2450952; U.S. Pat. No. 7,635,753.

[0561] In one embodiment, an antigen binding domain against Fos-related antigen 1 is an antigen binding portion, e.g., CDRs, of the antibody 12F9 (Novus Biologicals).

[0562] In one embodiment, an antigen binding domain against MelanA/MART1 is an antigen binding portion, e.g., CDRs, of an antibody described in, EP2514766 A2; or U.S. Pat. No. 7,749,719.

[0563] In one embodiment, an antigen binding domain against sarcoma translocation breakpoints is an antigen binding portion, e.g., CDRs, of an antibody described in, e.g., Luo et al, EMBO Mol. Med. 4(6):453-461 (2012).

[0564] In one embodiment, an antigen binding domain against TRP-2 is an antigen binding portion, e.g., CDRs, of an antibody described in, e.g., Wang et al, J Exp Med. 184(6):2207-16 (1996).

[0565] In one embodiment, an antigen binding domain against CYP1B1 is an antigen binding portion, e.g., CDRs, of an antibody described in, e.g., Maecker et al, Blood 102 (9): 3287-3294 (2003).

[0566] In one embodiment, an antigen binding domain against RAGE-1 is an antigen binding portion, e.g., CDRs, of the antibody MAB5328 (EMD Millipore).

[0567] In one embodiment, an antigen binding domain against human telomerase reverse transcriptase is an antigen binding portion, e.g., CDRs, of the antibody cat no: LS-B95-100 (Lifespan Biosciences)

[0568] In one embodiment, an antigen binding domain against intestinal carboxyl esterase is an antigen binding portion, e.g., CDRs, of the antibody 4F12: cat no: LS-B6190-50 (Lifespan Biosciences).

[0569] In one embodiment, an antigen binding domain against mut hsp70-2 is an antigen binding portion, e.g., CDRs, of the antibody Lifespan Biosciences: monoclonal: cat no: LS-C133261-100 (Lifespan Biosciences).

[0570] In one embodiment, an antigen binding domain against CD79a is an antigen binding portion, e.g., CDRs, of the antibody Anti-CD79a antibody [HM47/A9](ab3121), available from Abcam; antibody CD79A Antibody #3351 available from Cell Signalling Technology; or antibody HPA017748—Anti-CD79A antibody produced in rabbit, available from Sigma Aldrich.

[0571] In one embodiment, an antigen binding domain against CD79b is an antigen binding portion, e.g., CDRs, of the antibody polatuzumab vedotin, anti-CD79b described in Doman et al., “Therapeutic potential of an anti-CD79b antibody-drug conjugate, anti-CD79b-vc-MMAE, for the treatment of non-Hodgkin lymphoma” Blood. 2009 Sep. 24; 114(13):2721-9. doi: 10.1182/blood-2009-02-205500. Epub 2009 Jul. 24, or the bispecific antibody Anti-CD79b/CD3 described in “4507 Pre-Clinical Characterization of T Cell-Dependent Bispecific Antibody Anti-CD79b/CD3 As a Potential Therapy for B Cell Malignancies” Abstracts of 56^{th} ASH Annual Meeting and Exposition, San Francisco, CA December 6-9 2014.

[0572] In one embodiment, an antigen binding domain against CD72 is an antigen binding portion, e.g., CDRs, of the antibody J3-109 described in Myers, and Uckun, “An anti-CD72 immunotoxin against therapy-refractory B-lineage acute lymphoblastic leukemia.” Leuk Lymphoma. 1995 June; 18(1-2):119-22, or anti-CD72 (10D6.8.1, mIgG1) described in Polson et al., “Antibody-Drug Conjugates for the Treatment of Non-Hodgkin's Lymphoma: Target and Linker-Drug Selection” Cancer Res Mar. 15, 2009 69; 2358.

[0573] In one embodiment, an antigen binding domain against LAIR1 is an antigen binding portion, e.g., CDRs, of the antibody ANT-301 LAIR1 antibody, available from ProSpec; or anti-human CD305 (LAIR1) Antibody, available from BioLegend.

[0574] In one embodiment, an antigen binding domain against FCAR is an antigen binding portion, e.g., CDRs, of the antibody CD89/FCARAntibody (Catalog #10414-H08H), available from Sino Biological Inc.

[0575] In one embodiment, an antigen binding domain against LILRA2 is an antigen binding portion, e.g., CDRs, of the antibody LILRA2 monoclonal antibody (M17), clone 3C7, available from Abnova, or Mouse Anti-LILRA2 antibody, Monoclonal (2D7), available from Lifespan Biosciences.

[0576] In one embodiment, an antigen binding domain against CD300LF is an antigen binding portion, e.g., CDRs, of the antibody Mouse Anti-CMRF35-like molecule 1 antibody, Monoclonal[UP-D2], available from BioLegend, or Rat Anti-CMRF35-like molecule 1 antibody, Monoclonal[234903], available from R&D Systems.

[0577] In one embodiment, an antigen binding domain against CLEC12A is an antigen binding portion, e.g., CDRs, of the antibody Bispecific T cell Engager (BiTE) scFv-antibody and ADC described in Noordhuis et al., “Targeting of CLEC12A In Acute Myeloid Leukemia by Antibody-Drug-Conjugates and Bispecific CLL-1×CD3 BiTE Antibody” 53^{rd} ASH Annual Meeting and Exposition, Dec. 10-13, 2011, and MCLA-117 (Merus).

[0578] In one embodiment, an antigen binding domain against BST2 (also called CD317) is an antigen binding portion, e.g., CDRs, of the antibody Mouse Anti-CD317 antibody, Monoclonal[3H4], available from Antibodies-Online or Mouse Anti-CD317 antibody, Monoclonal[696739], available from R&D Systems.

[0579] In one embodiment, an antigen binding domain against EMR2 (also called CD312) is an antigen binding portion, e.g., CDRs, of the antibody Mouse Anti-CD312 antibody, Monoclonal[LS-B8033] available from Lifespan Biosciences, or Mouse Anti-CD312 antibody, Monoclonal[494025] available from R&D Systems.

[0580] In one embodiment, an antigen binding domain against LY75 is an antigen binding portion, e.g., CDRs, of the antibody Mouse Anti-Lymphocyte antigen 75 antibody, Monoclonal[HD30] available from EMD Millipore or Mouse Anti-Lymphocyte antigen 75 antibody, Monoclonal[A15797] available from Life Technologies.

[0581] In one embodiment, an antigen binding domain against GPC3 is an antigen binding portion, e.g., CDRs, of the antibody hGC33 described in Nakano K, Ishiguro T, Konishi H, et al. Generation of a humanized anti-glypican 3 antibody by CDR grafting and stability optimization. Anticancer Drugs. 2010 November; 21(10):907-916, or MDX-1414, HN3, or YP7, all three of which are described in Feng et al., “Glypican-3 antibodies: a new therapeutic target for liver cancer.” FEBS Lett. 2014 Jan. 21; 588(2):377-82.

[0582] In one embodiment, an antigen binding domain against FCRL5 is an antigen binding portion, e.g., CDRs, of the anti-FcRL5 antibody described in Elkins et al., “FcRL5 as a target of antibody-drug conjugates for the treatment of multiple myeloma” Mol Cancer Ther. 2012 October; 11(10):2222-32.

[0583] In one embodiment, an antigen binding domain against IGLL1 is an antigen binding portion, e.g., CDRs, of the antibody Mouse Anti-Immunoglobulin lambda-like polypeptide 1 antibody, Monoclonal[AT1G4] available from Lifespan Biosciences, Mouse Anti-Immunoglobulin lambda-like polypeptide 1 antibody, Monoclonal[HSL11] available from BioLegend.

[0584] In one embodiment, the antigen binding domain comprises one, two three (e.g., all three) heavy chain CDRs, HC CDR1, HC CDR2 and HC CDR3, from an antibody listed above, and/or one, two, three (e.g., all three) light chain CDRs, LC CDR1, LC CDR2 and LC CDR3, from an antibody listed above. In one embodiment, the antigen binding domain comprises a heavy chain variable region and/or a variable light chain region of an antibody listed above.

[0585] In another aspect, the antigen binding domain comprises a humanized antibody or an antibody fragment. In some aspects, a non-human antibody is humanized, where specific sequences or regions of the antibody are modified to increase similarity to an antibody naturally produced in a human or fragment thereof. In one aspect, the antigen binding domain is humanized.

### Bispecific CARs

[0586] In an embodiment a multispecific antibody molecule is a bispecific antibody molecule. A bispecific antibody has specificity for no more than two antigens. A bispecific antibody molecule is characterized by a first immunoglobulin variable domain sequence which has binding specificity for a first epitope and a second immunoglobulin variable domain sequence that has binding specificity for a second epitope. In an embodiment the first and second epitopes are on the same antigen, e.g., the same protein (or subunit of a multimeric protein). In an embodiment the first and second epitopes overlap. In an embodiment the first and second epitopes do not overlap. In an embodiment the first and second epitopes are on different antigens, e.g., different proteins (or different subunits of a multimeric protein). In an embodiment a bispecific antibody molecule comprises a heavy chain variable domain sequence and a light chain variable domain sequence which have binding specificity for a first epitope and a heavy chain variable domain sequence and a light chain variable domain sequence which have binding specificity for a second epitope. In an embodiment a bispecific antibody molecule comprises a half antibody having binding specificity for a first epitope and a half antibody having binding specificity for a second epitope. In an embodiment a bispecific antibody molecule comprises a half antibody, or fragment thereof, having binding specificity for a first epitope and a half antibody, or fragment thereof, having binding specificity for a second epitope. In an embodiment a bispecific antibody molecule comprises a scFv, or fragment thereof, have binding specificity for a first epitope and a scFv, or fragment thereof, have binding specificity for a second epitope.

[0587] In certain embodiments, the antibody molecule is a multi-specific (e.g., a bispecific or a trispecific) antibody molecule. Protocols for generating bispecific or heterodimeric antibody molecules are known in the art; including but not limited to, for example, the “knob in a hole” approach described in, e.g., U.S. Pat. No. 5,731,168; the electrostatic steering Fc pairing as described in, e.g., WO 09/089004, WO 06/106905 and WO 2010/129304; Strand Exchange Engineered Domains (SEED) heterodimer formation as described in, e.g., WO 07/110205; Fab arm exchange as described in, e.g., WO 08/119353, WO 2011/131746, and WO 2013/060867; double antibody conjugate, e.g., by antibody cross-linking to generate a bi-specific structure using a heterobifunctional reagent having an amine-reactive group and a sulfhydryl reactive group as described in, e.g., U.S. Pat. No. 4,433,059; bispecific antibody determinants generated by recombining half antibodies (heavy-light chain pairs or Fabs) from different antibodies through cycle of reduction and oxidation of disulfide bonds between the two heavy chains, as described in, e.g., U.S. Pat. No. 4,444,878; trifunctional antibodies, e.g., three Fab′ fragments cross-linked through sulfhdryl reactive groups, as described in, e.g., U.S. Pat. No. 5,273,743; biosynthetic binding proteins, e.g., pair of scFvs cross-linked through C-terminal tails preferably through disulfide or amine-reactive chemical cross-linking, as described in, e.g., U.S. Pat. No. 5,534,254; bifunctional antibodies, e.g., Fab fragments with different binding specificities dimerized through leucine zippers (e.g., c-fos and c-jun) that have replaced the constant domain, as described in, e.g., U.S. Pat. No. 5,582,996; bispecific and oligospecific mono- and oligovalent receptors, e.g., VH—CH1 regions of two antibodies (two Fab fragments) linked through a polypeptide spacer between the CH1 region of one antibody and the VH region of the other antibody typically with associated light chains, as described in, e.g., U.S. Pat. No. 5,591,828; bispecific DNA-antibody conjugates, e.g., crosslinking of antibodies or Fab fragments through a double stranded piece of DNA, as described in, e.g., U.S. Pat. No. 5,635,602; bispecific fusion proteins, e.g., an expression construct containing two scFvs with a hydrophilic helical peptide linker between them and a full constant region, as described in, e.g., U.S. Pat. No. 5,637,481; multivalent and multispecific binding proteins, e.g., dimer of polypeptides having first domain with binding region of Ig heavy chain variable region, and second domain with binding region of Ig light chain variable region, generally termed diabodies (higher order structures are also encompassed creating for bispecific, trispecific, or tetraspecific molecules, as described in, e.g., U.S. Pat. No. 5,837,242; minibody constructs with linked VL and VH chains further connected with peptide spacers to an antibody hinge region and CH3 region, which can be dimerized to form bispecific/multivalent molecules, as described in, e.g., U.S. Pat. No. 5,837,821; VH and VL domains linked with a short peptide linker (e.g., 5 or 10 amino acids) or no linker at all in either orientation, which can form dimers to form bispecific diabodies; trimers and tetramers, as described in, e.g., U.S. Pat. No. 5,844,094; String of VH domains (or VL domains in family members) connected by peptide linkages with crosslinkable groups at the C-terminus further associated with VL domains to form a series of FVs (or scFvs), as described in, e.g., U.S. Pat. No. 5,864,019; and single chain binding polypeptides with both a VH and a VL domain linked through a peptide linker are combined into multivalent structures through non-covalent or chemical crosslinking to form, e.g., homobivalent, heterobivalent, trivalent, and tetravalent structures using both scFV or diabody type format, as described in, e.g., U.S. Pat. No. 5,869,620. Additional exemplary multispecific and bispecific molecules and methods of making the same are found, for example, in U.S. Pat. Nos. 5,910,573, 5,932,448, 5,959,083, 5,989,830, 6,005,079, 6,239,259, 6,294,353, 6,333,396, 6,476,198, 6,511,663, 6,670,453, 6,743,896, 6,809,185, 6,833,441, 7,129,330, 7,183,076, 7,521,056, 7,527,787, 7,534,866, 7,612,181, US2002004587A1, US2002076406A1, US2002103345A1, US2003207346A1, US2003211078A1, US2004219643A1, US2004220388A1, US2004242847A1, US2005003403A1, US2005004352A1, US2005069552A1, US2005079170A1, US2005100543A1, US2005136049A1, US2005136051A1, US2005163782A1, US2005266425A1, US2006083747A1, US2006120960A1, US2006204493A1, US2006263367A1, US2007004909A1, US2007087381A1, US2007128150A1, US2007141049A1, US2007154901A1, US2007274985A1, US2008050370A1, US2008069820A1, US2008152645A1, US2008171855A1, US2008241884A1, US2008254512A1, US2008260738A1, US2009130106A1, US2009148905A1, US2009155275A1, US2009162359A1, US2009162360A1, US2009175851A1, US2009175867A1, US2009232811A1, US2009234105A1, US2009263392A1, US2009274649A1, EP346087A2, WO0006605A2, WO02072635A2, WO04081051A1, WO06020258A2, WO2007044887A2, WO2007095338A2, WO2007137760A2, WO2008119353A1, WO2009021754A2, WO2009068630A1, WO9103493A1, WO9323537A1, WO9409131A1, WO9412625A2, WO9509917A1, WO9637621A2, WO9964460A1. The contents of the above-referenced applications are incorporated herein by reference in their entireties.

[0588] Within each antibody or antibody fragment (e.g., scFv) of a bispecific antibody molecule, the VH can be upstream or downstream of the VL. In some embodiments, the upstream antibody or antibody fragment (e.g., scFv) is arranged with its VH (VH₁) upstream of its VL (VL₁) and the downstream antibody or antibody fragment (e.g., scFv) is arranged with its VL (VL₂) upstream of its VH (VH₂), such that the overall bispecific antibody molecule has the arrangement VH₁-VL₁-VL₂-VH₂. In other embodiments, the upstream antibody or antibody fragment (e.g., scFv) is arranged with its VL (VL₁) upstream of its VH (VH₁) and the downstream antibody or antibody fragment (e.g., scFv) is arranged with its VH (VH₂) upstream of its VL (VL₂), such that the overall bispecific antibody molecule has the arrangement VL₁-VH₁—VH₂-VL₂. Optionally, a linker is disposed between the two antibodies or antibody fragments (e.g., scFvs), e.g., between VL₁ and VL₂ if the construct is arranged as VH₁-VL₁-VL₂-VH₂, or between VH₁ and VH₂ if the construct is arranged as VL₁-VH₁—VH₂-VL₂. The linker may be a linker as described herein, e.g., a (Gly₄-Ser)n linker, wherein n is 1, 2, 3, 4, 5, or 6, preferably 4 (SEQ ID NO: 78). In general, the linker between the two scFvs should be long enough to avoid mispairing between the domains of the two scFvs. Optionally, a linker is disposed between the VL and VH of the first scFv. Optionally, a linker is disposed between the VL and VH of the second scFv. In constructs that have multiple linkers, any two or more of the linkers can be the same or different. Accordingly, in some embodiments, a bispecific CAR comprises VLs, VHs, and optionally one or more linkers in an arrangement as described herein.

### Stability and Mutations

[0589] The stability of an antigen binding domain to a cancer associated antigen as described herein, e.g., scFv molecules (e.g., soluble scFv), can be evaluated in reference to the biophysical properties (e.g., thermal stability) of a conventional control scFv molecule or a full length antibody. In one embodiment, the humanized scFv has a thermal stability that is greater than about 0.1, about 0.25, about 0.5, about 0.75, about 1, about 1.25, about 1.5, about 1.75, about 2, about 2.5, about 3, about 3.5, about 4, about 4.5, about 5, about 5.5, about 6, about 6.5, about 7, about 7.5, about 8, about 8.5, about 9, about 9.5, about 10 degrees, about 11 degrees, about 12 degrees, about 13 degrees, about 14 degrees, or about 15 degrees Celsius than a control binding molecule (e.g. a conventional scFv molecule) in the described assays.

[0590] The improved thermal stability of the antigen binding domain to a cancer associated antigen described herein, e.g., scFv is subsequently conferred to the entire CAR construct, leading to improved therapeutic properties of the CAR construct. The thermal stability of the antigen binding domain of a cancer associated antigen described herein, e.g., scFv, can be improved by at least about 2° C. or 3° C. as compared to a conventional antibody. In one embodiment, the antigen binding domain of—a cancer associated antigen described herein, e.g., scFv, has a 1° C. improved thermal stability as compared to a conventional antibody. In another embodiment, the antigen binding domain of a cancer associated antigen described herein, e.g., scFv, has a 2° C. improved thermal stability as compared to a conventional antibody. In another embodiment, the scFv has a 4, 5, 6, 7, 8, 9, 10, 11, 12, 13, 14, 15° C. improved thermal stability as compared to a conventional antibody. Comparisons can be made, for example, between the scFv molecules disclosed herein and scFv molecules or Fab fragments of an antibody from which the scFv VH and VL were derived. Thermal stability can be measured using methods known in the art. For example, in one embodiment, Tm can be measured. Methods for measuring Tm and other methods of determining protein stability are described in more detail below.

[0591] Mutations in scFv (arising through humanization or direct mutagenesis of the soluble scFv) can alter the stability of the scFv and improve the overall stability of the scFv and the CAR construct. Stability of the humanized scFv is compared against the murine scFv using measurements such as Tm, temperature denaturation and temperature aggregation.

[0592] The binding capacity of the mutant scFvs can be determined using assays know in the art and described herein.

[0593] In one embodiment, the antigen binding domain of a cancer associated antigen described herein, e.g., scFv, comprises at least one mutation arising from the humanization process such that the mutated scFv confers improved stability to the CAR construct. In another embodiment, the antigen binding domain of a cancer associated antigen described herein, e.g., scFv, comprises at least 1, 2, 3, 4, 5, 6, 7, 8, 9, 10 mutations arising from the humanization process such that the mutated scFv confers improved stability to the CAR construct.

### Methods of Evaluating Protein Stability

[0594] The stability of an antigen binding domain may be assessed using, e.g., the methods described below. Such methods allow for the determination of multiple thermal unfolding transitions where the least stable domain either unfolds first or limits the overall stability threshold of a multidomain unit that unfolds cooperatively (e.g., a multidomain protein which exhibits a single unfolding transition). The least stable domain can be identified in a number of additional ways. Mutagenesis can be performed to probe which domain limits the overall stability. Additionally, protease resistance of a multidomain protein can be performed under conditions where the least stable domain is known to be intrinsically unfolded via DSC or other spectroscopic methods (Fontana, et al., (1997) Fold. Des., 2: R17-26; Dimasi et al. (2009) J. Mol. Biol. 393: 672-692). Once the least stable domain is identified, the sequence encoding this domain (or a portion thereof) may be employed as a test sequence in the methods.

### Thermal Stability

[0595] The thermal stability of the compositions may be analyzed using a number of non-limiting biophysical or biochemical techniques known in the art. In certain embodiments, thermal stability is evaluated by analytical spectroscopy.

[0596] An exemplary analytical spectroscopy method is Differential Scanning Calorimetry (DSC). DSC employs a calorimeter which is sensitive to the heat absorbances that accompany the unfolding of most proteins or protein domains (see, e.g. Sanchez-Ruiz, et al., Biochemistry, 27: 1648-52, 1988). To determine the thermal stability of a protein, a sample of the protein is inserted into the calorimeter and the temperature is raised until the Fab or scFv unfolds. The temperature at which the protein unfolds is indicative of overall protein stability.

[0597] Another exemplary analytical spectroscopy method is Circular Dichroism (CD) spectroscopy. CD spectrometry measures the optical activity of a composition as a function of increasing temperature. Circular dichroism (CD) spectroscopy measures differences in the absorption of left-handed polarized light versus right-handed polarized light which arise due to structural asymmetry. A disordered or unfolded structure results in a CD spectrum very different from that of an ordered or folded structure. The CD spectrum reflects the sensitivity of the proteins to the denaturing effects of increasing temperature and is therefore indicative of a protein's thermal stability (see van Mierlo and Steemsma, J. Biotechnol., 79(3):281-98, 2000).

[0598] Another exemplary analytical spectroscopy method for measuring thermal stability is Fluorescence Emission Spectroscopy (see van Mierlo and Steemsma, supra). Yet another exemplary analytical spectroscopy method for measuring thermal stability is Nuclear Magnetic Resonance (NMR) spectroscopy (see, e.g. van Mierlo and Steemsma, supra).

The thermal stability of a composition can be measured biochemically. An exemplary biochemical method for assessing thermal stability is a thermal challenge assay. In a “thermal challenge assay”, a composition is subjected to a range of elevated temperatures for a set period of time. For example, in one embodiment, test scFv molecules or molecules comprising scFv molecules are subject to a range of increasing temperatures, e.g., for 1-1.5 hours. The activity of the protein is then assayed by a relevant biochemical assay. For example, if the protein is a binding protein (e.g. an scFv or scFv-containing polypeptide) the binding activity of the binding protein may be determined by a functional or quantitative ELISA.

[0599] Such an assay may be done in a high-throughput format and those disclosed in the Examples using E. coli and high throughput screening. A library of antigen binding domains, e.g., that includes an antigen binding domain to a cancer associated antigen described herein, e.g., scFv variants, may be created using methods known in the art. Antigen binding domain, e.g., to a cancer associated antigen described herein, e.g., scFv, expression may be induced and the antigen binding domain, e.g., to a cancer associated antigen described herein, e.g., scFv, may be subjected to thermal challenge. The challenged test samples may be assayed for binding and those antigen binding domains to a cancer associated antigen described herein, e.g., scFvs, which are stable may be scaled up and further characterized.

[0600] Thermal stability is evaluated by measuring the melting temperature (Tm) of a composition using any of the above techniques (e.g. analytical spectroscopy techniques). The melting temperature is the temperature at the midpoint of a thermal transition curve wherein 50% of molecules of a composition are in a folded state (See e.g., Dimasi et al. (2009) J. Mol Biol. 393: 672-692). In one embodiment, Tm values for an antigen binding domain to a cancer associated antigen described herein, e.g., scFv, are about 40° C., 41° C., 42° C., 43° C., 44° C., 45° C., 46° C., 47° C., 48° C., 49° C., 50° C., 51° C., 52° C., 53° C., 54° C., 55° C., 56° C., 57° C., 58° C., 59° C., 60° C., 61° C., 62° C., 63° C., 64° C., 65° C., 66° C., 67° C., 68° C., 69° C., 70° C., 71° C., 72° C., 73° C., 74° C., 75° C., 76° C., 77° C., 78° C., 79° C., 80° C., 81° C., 82° C., 83° C., 84° C., 85° C., 86° C., 87° C., 88° C., 89° C., 90° C., 91° C., 92° C., 93° C., 94° C., 95° C., 96° C., 97° C., 98° C., 99° C., 100° C. In one embodiment, Tm values for an IgG is about 40° C., 41° C., 42° C., 43° C., 44° C., 45° C., 46° C., 47° C., 48° C., 49° C., 50° C., 51° C., 52° C., 53° C., 54° C., 55° C., 56° C., 57° C., 58° C., 59° C., 60° C., 61° C., 62° C., 63° C., 64° C., 65° C., 66° C., 67° C., 68° C., 69° C., 70° C., 71° C., 72° C., 73° C., 74° C., 75° C., 76° C., 77° C., 78° C., 79° C., 80° C., 81° C., 82° C., 83° C., 84° C., 85° C., 86° C., 87° C., 88° C., 89° C., 90° C., 91° C., 92° C., 93° C., 94° C., 95° C., 96° C., 97° C., 98° C., 99° C., 100° C. In one embodiment, Tm values for an multivalent antibody is about 40° C., 41° C., 42° C., 43° C., 44° C., 45° C., 46° C., 47° C., 48° C., 49° C., 50° C., 51° C., 52° C., 53° C., 54° C., 55° C., 56° C., 57° C., 58° C., 59° C., 60° C., 61° C., 62° C., 63° C., 64° C., 65° C., 66° C., 67° C., 68° C., 69° C., 70° C., 71° C., 72° C., 73° C., 74° C., 75° C., 76° C., 77° C., 78° C., 79° C., 80° C., 81° C., 82° C., 83° C., 84° C., 85° C., 86° C., 87° C., 88° C., 89° C., 90° C., 91° C., 92° C., 93° C., 94° C., 95° C., 96° C., 97° C., 98° C., 99° C., 100° C.

[0601] Thermal stability is also evaluated by measuring the specific heat or heat capacity (Cp) of a composition using an analytical calorimetric technique (e.g. DSC). The specific heat of a composition is the energy (e.g. in kcal/mol) is required to rise by 1° C., the temperature of 1 mol of water. As large Cp is a hallmark of a denatured or inactive protein composition. The change in heat capacity (ΔCp) of a composition is measured by determining the specific heat of a composition before and after its thermal transition. Thermal stability may also be evaluated by measuring or determining other parameters of thermodynamic stability including Gibbs free energy of unfolding (ΔG), enthalpy of unfolding (ΔH), or entropy of unfolding (ΔS). One or more of the above biochemical assays (e.g. a thermal challenge assay) are used to determine the temperature (i.e. the T_{C} value) at which 50% of the composition retains its activity (e.g. binding activity).

[0602] In addition, mutations to the antigen binding domain of a cancer associated antigen described herein, e.g., scFv, can be made to alter the thermal stability of the antigen binding domain of a cancer associated antigen described herein, e.g., scFv, as compared with the unmutated antigen binding domain of a cancer associated antigen described herein, e.g., scFv. When the humanized antigen binding domain of a cancer associated antigen described herein, e.g., scFv, is incorporated into a CAR construct, the antigen binding domain of the cancer associated antigen described herein, e.g., humanized scFv, confers thermal stability to the overall CARs of the present invention. In one embodiment, the antigen binding domain to a cancer associated antigen described herein, e.g., scFv, comprises a single mutation that confers thermal stability to the antigen binding domain of the cancer associated antigen described herein, e.g., scFv. In another embodiment, the antigen binding domain to a cancer associated antigen described herein, e.g., scFv, comprises multiple mutations that confer thermal stability to the antigen binding domain to the cancer associated antigen described herein, e.g., scFv. In one embodiment, the multiple mutations in the antigen binding domain to a cancer associated antigen described herein, e.g., scFv, have an additive effect on thermal stability of the antigen binding domain to the cancer associated antigen described herein binding domain, e.g., scFv.

### b) % Aggregation

[0603] The stability of a composition can be determined by measuring its propensity to aggregate. Aggregation can be measured by a number of non-limiting biochemical or biophysical techniques. For example, the aggregation of a composition may be evaluated using chromatography, e.g. Size-Exclusion Chromatography (SEC). SEC separates molecules on the basis of size. A column is filled with semi-solid beads of a polymeric gel that will admit ions and small molecules into their interior but not large ones. When a protein composition is applied to the top of the column, the compact folded proteins (i.e. non-aggregated proteins) are distributed through a larger volume of solvent than is available to the large protein aggregates. Consequently, the large aggregates move more rapidly through the column, and in this way the mixture can be separated or fractionated into its components. Each fraction can be separately quantified (e.g. by light scattering) as it elutes from the gel. Accordingly, the % aggregation of a composition can be determined by comparing the concentration of a fraction with the total concentration of protein applied to the gel. Stable compositions elute from the column as essentially a single fraction and appear as essentially a single peak in the elution profile or chromatogram.

### c) Binding Affinity

[0604] The stability of a composition can be assessed by determining its target binding affinity. A wide variety of methods for determining binding affinity are known in the art. An exemplary method for determining binding affinity employs surface plasmon resonance. Surface plasmon resonance is an optical phenomenon that allows for the analysis of real-time biospecific interactions by detection of alterations in protein concentrations within a biosensor matrix, for example using the BIAcore system (Pharmacia Biosensor AB, Uppsala, Sweden and Piscataway, N.J.). For further descriptions, see Jonsson, U., et al. (1993) Ann. Biol. Clin. 51:19-26; Jonsson, U., i (1991) Biotechniques 11:620-627; Johnsson, B., et al. (1995) J. Mol. Recognit. 8:125-131; and Johnnson, B., et al. (1991) Anal. Biochem. 198:268-277.

[0605] In one aspect, the antigen binding domain of the CAR comprises an amino acid sequence that is homologous to an antigen binding domain amino acid sequence described herein, and the antigen binding domain retains the desired functional properties of the antigen binding domain described herein.

[0606] In one specific aspect, the CAR composition of the invention comprises an antibody fragment. In a further aspect, the antibody fragment comprises an scFv.

[0607] In various aspects, the antigen binding domain of the CAR is engineered by modifying one or more amino acids within one or both variable regions (e.g., VH and/or VL), for example within one or more CDR regions and/or within one or more framework regions. In one specific aspect, the CAR composition of the invention comprises an antibody fragment. In a further aspect, the antibody fragment comprises an scFv.

[0608] It will be understood by one of ordinary skill in the art that the antibody or antibody fragment of the invention may further be modified such that they vary in amino acid sequence (e.g., from wild-type), but not in desired activity. For example, additional nucleotide substitutions leading to amino acid substitutions at “non-essential” amino acid residues may be made to the protein For example, a nonessential amino acid residue in a molecule may be replaced with another amino acid residue from the same side chain family. In another embodiment, a string of amino acids can be replaced with a structurally similar string that differs in order and/or composition of side chain family members, e.g., a conservative substitution, in which an amino acid residue is replaced with an amino acid residue having a similar side chain, may be made.

[0609] Families of amino acid residues having similar side chains have been defined in the art, including basic side chains (e.g., lysine, arginine, histidine), acidic side chains (e.g., aspartic acid, glutamic acid), uncharged polar side chains (e.g., glycine, asparagine, glutamine, serine, threonine, tyrosine, cysteine), nonpolar side chains (e.g., alanine, valine, leucine, isoleucine, proline, phenylalanine, methionine, tryptophan), beta-branched side chains (e.g., threonine, valine, isoleucine) and aromatic side chains (e.g., tyrosine, phenylalanine, tryptophan, histidine).

[0610] Percent identity in the context of two or more nucleic acids or polypeptide sequences, refers to two or more sequences that are the same. Two sequences are “substantially identical” if two sequences have a specified percentage of amino acid residues or nucleotides that are the same (e.g., 60% identity, optionally 70%, 71%, 72%, 73%, 74%, 75%, 76%, 77%, 78%, 79%, 80%,81%, 82%, 83%, 84%, 85%, 86%, 87%, 88%, 89%, 90%, 91%, 92%, 93%, 94%, 95%, 96%, 97%, 98%, 99% identity over a specified region, or, when not specified, over the entire sequence), when compared and aligned for maximum correspondence over a comparison window, or designated region as measured using one of the following sequence comparison algorithms or by manual alignment and visual inspection. Optionally, the identity exists over a region that is at least about 50 nucleotides (or 10 amino acids) in length, or more preferably over a region that is 100 to 500 or 1000 or more nucleotides (or 20, 50, 200 or more amino acids) in length.

[0611] For sequence comparison, typically one sequence acts as a reference sequence, to which test sequences are compared. When using a sequence comparison algorithm, test and reference sequences are entered into a computer, subsequence coordinates are designated, if necessary, and sequence algorithm program parameters are designated. Default program parameters can be used, or alternative parameters can be designated. The sequence comparison algorithm then calculates the percent sequence identities for the test sequences relative to the reference sequence, based on the program parameters. Methods of alignment of sequences for comparison are well known in the art. Optimal alignment of sequences for comparison can be conducted, e.g., by the local homology algorithm of Smith and Waterman, (1970) Adv. Appl. Math. 2:482c, by the homology alignment algorithm of Needleman and Wunsch, (1970) J. Mol. Biol. 48:443, by the search for similarity method of Pearson and Lipman, (1988) Proc. Nat'l. Acad. Sci. USA 85:2444, by computerized implementations of these algorithms (GAP, BESTFIT, FASTA, and TFASTA in the Wisconsin Genetics Software Package, Genetics Computer Group, 575 Science Dr., Madison, WI), or by manual alignment and visual inspection (see, e.g., Brent et al., (2003) Current Protocols in Molecular Biology).

[0612] Two examples of algorithms that are suitable for determining percent sequence identity and sequence similarity are the BLAST and BLAST 2.0 algorithms, which are described in Altschul et al., (1977) Nuc. Acids Res. 25:3389-3402; and Altschul et al., (1990) J. Mol. Biol. 215:403-410, respectively. Software for performing BLAST analyses is publicly available through the National Center for Biotechnology Information.

[0613] The percent identity between two amino acid sequences can also be determined using the algorithm of E. Meyers and W. Miller, (1988) Comput. Appl. Biosci. 4:11-17) which has been incorporated into the ALIGN program (version 2.0), using a PAM120 weight residue table, a gap length penalty of 12 and a gap penalty of 4. In addition, the percent identity between two amino acid sequences can be determined using the Needleman and Wunsch (1970) J. Mol. Biol. 48:444-453) algorithm which has been incorporated into the GAP program in the GCG software package (available at www.gcg.com), using either a Blossom 62 matrix or a PAM250 matrix, and a gap weight of 16, 14, 12, 10, 8, 6, or 4 and a length weight of 1, 2, 3, 4, 5, or 6.

[0614] In one aspect, the present invention contemplates modifications of the starting antibody or fragment (e.g., scFv) amino acid sequence that generate functionally equivalent molecules. For example, the VH or VL of an antigen binding domain to a cancer associated antigen described herein, e.g., scFv, comprised in the CAR can be modified to retain at least about 70%, 71%, 72%, 73%, 74%, 75%, 76%, 77%, 78%, 79%, 80%,81%, 82%, 83%, 84%, 85%, 86%, 87%, 88%, 89%, 90%, 91%, 92%, 93%, 94%, 95%, 96%, 97%, 98%, 99% identity of the starting VH or VL framework region of the antigen binding domain to the cancer associated antigen described herein, e.g., scFv. The present invention contemplates modifications of the entire CAR construct, e.g., modifications in one or more amino acid sequences of the various domains of the CAR construct in order to generate functionally equivalent molecules. The CAR construct can be modified to retain at least about 70%, 71%, 72%, 73%, 74%, 75%, 76%, 77%, 78%, 79%, 80%, 81%, 82%, 83%, 84%, 85%, 86%, 87%, 88%, 89%, 90%, 91%, 92%, 93%, 94%, 95%, 96%, 97%, 98%, 99% identity of the starting CAR construct.

### Transmembrane Domain

[0615] With respect to the transmembrane domain, in various embodiments, a CAR can be designed to comprise a transmembrane domain that is attached to the extracellular domain of the CAR. A transmembrane domain can include one or more additional amino acids adjacent to the transmembrane region, e.g., one or more amino acid associated with the extracellular region of the protein from which the transmembrane was derived (e.g., 1, 2, 3, 4, 5, 6, 7, 8, 9, 10 up to 15 amino acids of the extracellular region) and/or one or more additional amino acids associated with the intracellular region of the protein from which the transmembrane protein is derived (e.g., 1, 2, 3, 4, 5, 6, 7, 8, 9, 10 up to 15 amino acids of the intracellular region). In one aspect, the transmembrane domain is one that is associated with one of the other domains of the CAR e.g., in one embodiment, the transmembrane domain may be from the same protein that the signaling domain, costimulatory domain or the hinge domain is derived from. In another aspect, the transmembrane domain is not derived from the same protein that any other domain of the CAR is derived from. In some instances, the transmembrane domain can be selected or modified by amino acid substitution to avoid binding of such domains to the transmembrane domains of the same or different surface membrane proteins, e.g., to minimize interactions with other members of the receptor complex. In one aspect, the transmembrane domain is capable of homodimerization with another CAR on the cell surface of a CAR-expressing cell. In a different aspect, the amino acid sequence of the transmembrane domain may be modified or substituted so as to minimize interactions with the binding domains of the native binding partner present in the same CAR-expressing cell.

[0616] The transmembrane domain may be derived either from a natural or from a recombinant source. Where the source is natural, the domain may be derived from any membrane-bound or transmembrane protein. In one aspect the transmembrane domain is capable of signaling to the intracellular domain(s) whenever the CAR has bound to a target. A transmembrane domain of particular use in this invention may include at least the transmembrane region(s) of e.g., the alpha, beta or zeta chain of the T-cell receptor, CD28, CD27, CD3 epsilon, CD45, CD4, CD5, CD8, CD9, CD16, CD22, CD33, CD37, CD64, CD80, CD86, CD134, CD137, CD154. In some embodiments, a transmembrane domain may include at least the transmembrane region(s) of, e.g., KIRDS2, OX40, CD2, CD27, LFA-1 (CD11a, CD18), ICOS (CD278), 4-1BB (CD137), GITR, CD40, BAFFR, HVEM (LIGHTR), SLAMF7, NKp80 (KLRF1), NKp44, NKp30, NKp46, CD160, CD19, IL2R beta, IL2R gamma, IL7R α, ITGA1, VLA1, CD49a, ITGA4, IA4, CD49D, ITGA6, VLA-6, CD49f, ITGAD, CD11d, ITGAE, CD103, ITGAL, CD11a, LFA-1, ITGAM, CD11b, ITGAX, CD11c, ITGB1, CD29, ITGB2, CD18, LFA-1, ITGB7, TNFR2, DNAM1 (CD226), SLAMF4 (CD244, 2B4), CD84, CD96 (Tactile), CEACAM1, CRTAM, Ly9 (CD229), CD160 (BY55), PSGL1, CD100 (SEMA4D), SLAMF6 (NTB-A, Ly108), SLAM (SLAMF1, CD150, IPO-3), BLAME (SLAMF8), SELPLG (CD162), LTBR, PAG/Cbp, NKG2D, NKG2C, or a functional variant thereof.

[0617] In some instances, the transmembrane domain can be attached to the extracellular region of the CAR, e.g., the antigen binding domain of the CAR, via a hinge, e.g., a hinge from a human protein. For example, in one embodiment, the hinge can be a human Ig (immunoglobulin) hinge (e.g., an IgG4 hinge, an IgD hinge), a GS linker (e.g., a GS linker described herein), a KIR2DS2 hinge or a CD8a hinge. In one embodiment, the hinge or spacer comprises (e.g., consists of) the amino acid sequence of SEQ ID NO:403. In one aspect, the transmembrane domain comprises (e.g., consists of) a transmembrane domain of SEQ ID NO: 12.

[0618] In one aspect, the hinge or spacer comprises an IgG4 hinge. For example, in one embodiment, the hinge or spacer comprises a hinge of the amino acid sequence ESKYGPPCPPCPAPEFLGGPSVFLFPPKPKDTLMISRTPEVTCVVVDVSQEDPEVQFN WYVDGVEVHNAKTKPREEQFNSTYRVVSVLTVLHQDWLNGKEYKCKVSNKGLPS SIEKTISKAKGQPREPQVYTLPPSQEEMTKNQVSLTCLVKGFYPSDIAVEWESNGQP ENNYKTTPPVLDSDGSFFLYSRLTVDKSRWQEGNVFSCSVMHEALHNHYTQKSLS LSLGKM (SEQ ID NO:405). In some embodiments, the hinge or spacer comprises a hinge encoded by a nucleotide sequence of GAGAGCAAGTACGGCCCTCCCTGCCCCCCTTGCCCTGCCCCCGAGTTCCTGGGC GGACCCAGCGTGTTCCTGTTCCCCCCCAAGCCCAAGGACACCCTGATGATCAGC CGGACCCCCGAGGTGACCTGTGTGGTGGTGGACGTGTCCCAGGAGGACCCCGA GGTCCAGTTCAACTGGTACGTGGACGGCGTGGAGGTGCACAACGCCAAGACCA AGCCCCGGGAGGAGCAGTTCAATAGCACCTACCGGGTGGTGTCCGTGCTGACC GTGCTGCACCAGGACTGGCTGAACGGCAAGGAATACAAGTGTAAGGTGTCCAA CAAGGGCCTGCCCAGCAGCATCGAGAAAACCATCAGCAAGGCCAAGGGCCAGC CTCGGGAGCCCCAGGTGTACACCCTGCCCCCTAGCCAAGAGGAGATGACCAAG AACCAGGTGTCCCTGACCTGCCTGGTGAAGGGCTTCTACCCCAGCGACATCGCC GTGGAGTGGGAGAGCAACGGCCAGCCCGAGAACAACTACAAGACCACCCCCCC TGTGCTGGACAGCGACGGCAGCTTCTTCCTGTACAGCCGGCTGACCGTGGACAA GAGCCGGTGGCAGGAGGGCAACGTCTTTAGCTGCTCCGTGATGCACGAGGCCC TGCACAACCACTACACCCAGAAGAGCCTGAGCCTGTCCCTGGGCAAGATG (SEQ ID NO:406).

[0619] In one aspect, the hinge or spacer comprises an IgD hinge. For example, in one embodiment, the hinge or spacer comprises a hinge of the amino acid sequence RWPESPKAQASSVPTAQPQAEGSLAKATTAPATTRNTGRGGEEKKKEKEKEEQEE RETKTPECPSHTQPLGVYLLTPAVQDLWLRDKATFTCFVVGSDLKDAHLTWEVAG KVPTGGVEEGLLERHSNGSQSQHSRLTLPRSLWNAGTSVTCTLNHPSLPPQRLMAL REPAAQAPVKLSLNLLASSDPPEAASWLLCEVSGFSPPNILLMWLEDQREVNTSGF APARPPPQPGSTTFWAWSVLRVPAPPSPQPATYTCVVSHEDSRTLLNASRSLEVSYV TDH (SEQ ID NO:407). In some embodiments, the hinge or spacer comprises a hinge encoded by a nucleotide sequence of AGGTGGCCCGAAAGTCCCAAGGCCCAGGCATCTAGTGTTCCTACTGCACAGCCC CAGGCAGAAGGCAGCCTAGCCAAAGCTACTACTGCACCTGCCACTACGCGCAA TACTGGCCGTGGCGGGGAGGAGAAGAAAAAGGAGAAAGAGAAAGAAGAACAG GAAGAGAGGGAGACCAAGACCCCTGAATGTCCATCCCATACCCAGCCGCTGGG CGTCTATCTCTTGACTCCCGCAGTACAGGACTTGTGGCTTAGAGATAAGGCCAC CTTTACATGTTTCGTCGTGGGCTCTGACCTGAAGGATGCCCATTTGACTTGGGA GGTTGCCGGAAAGGTACCCACAGGGGGGGTTGAGGAAGGGTTGCTGGAGCGCC ATTCCAATGGCTCTCAGAGCCAGCACTCAAGACTCACCCTTCCGAGATCCCTGT GGAACGCCGGGACCTCTGTCACATGTACTCTAAATCATCCTAGCCTGCCCCCAC AGCGTCTGATGGCCCTTAGAGAGCCAGCCGCCCAGGCACCAGTTAAGCTTAGCC TGAATCTGCTCGCCAGTAGTGATCCCCCAGAGGCCGCCAGCTGGCTCTTATGCG AAGTGTCCGGCTTTAGCCCGCCCAACATCTTGCTCATGTGGCTGGAGGACCAGC GAGAAGTGAACACCAGCGGCTTCGCTCCAGCCCGGCCCCCACCCCAGCCGGGT TCTACCACATTCTGGGCCTGGAGTGTCTTAAGGGTCCCAGCACCACCTAGCCCC CAGCCAGCCACATACACCTGTGTTGTGTCCCATGAAGATAGCAGGACCCTGCTA AATGCTTCTAGGAGTCTGGAGGTTTCCTACGTGACTGACCATT (SEQ ID NO:408).

[0620] In one aspect, the transmembrane domain may be recombinant, in which case it will comprise predominantly hydrophobic residues such as leucine and valine. In one aspect a triplet of phenylalanine, tryptophan and valine can be found at each end of a recombinant transmembrane domain.

[0621] Optionally, a short oligo- or polypeptide linker, between 2 and 10 amino acids in length may form the linkage between the transmembrane domain and the cytoplasmic region of the CAR. A glycine-serine doublet provides a particularly suitable linker. For example, in one aspect, the linker comprises the amino acid sequence of GGGGSGGGGS (SEQ ID NO: 10). In some embodiments, the linker is encoded by a nucleotide sequence of GGTGGCGGAGGTTCTGGAGGTGGAGGTTCC (SEQ ID NO: 11).

[0622] In one aspect, the hinge or spacer comprises a KIR2DS2 hinge.

### Cytoplasmic Domain

[0623] The cytoplasmic domain or region of the CAR includes an intracellular signaling domain. An intracellular signaling domain is generally responsible for activation of at least one of the normal effector functions of the immune cell in which the CAR has been introduced. The term “effector function” refers to a specialized function of a cell. Effector function of a T cell, for example, may be cytolytic activity or helper activity including the secretion of cytokines. Thus the term “intracellular signaling domain” refers to the portion of a protein which transduces the effector function signal and directs the cell to perform a specialized function. While usually the entire intracellular signaling domain can be employed, in many cases it is not necessary to use the entire chain. To the extent that a truncated portion of the intracellular signaling domain is used, such truncated portion may be used in place of the intact chain as long as it transduces the effector function signal. The term intracellular signaling domain is thus meant to include any truncated portion of the intracellular signaling domain sufficient to transduce the effector function signal.

[0624] Examples of intracellular signaling domains for use in the CAR of the invention include the cytoplasmic sequences of the T cell receptor (TCR) and co-receptors that act in concert to initiate signal transduction following antigen receptor engagement, as well as any derivative or variant of these sequences and any recombinant sequence that has the same functional capability.

[0625] It is known that signals generated through the TCR alone are insufficient for full activation of the T cell and that a secondary and/or costimulatory signal is also required. Thus, T cell activation can be said to be mediated by two distinct classes of cytoplasmic signaling sequences: those that initiate antigen-dependent primary activation through the TCR (primary intracellular signaling domains) and those that act in an antigen-independent manner to provide a secondary or costimulatory signal (secondary cytoplasmic domain, e.g., a costimulatory domain).

[0626] A primary signaling domain regulates primary activation of the TCR complex either in a stimulatory way, or in an inhibitory way. Primary intracellular signaling domains that act in a stimulatory manner may contain signaling motifs which are known as immunoreceptor tyrosine-based activation motifs or ITAMs.

[0627] Examples of ITAM containing primary intracellular signaling domains that are of particular use in the invention include those of CD3 zeta, common FcR gamma (FCER1G), Fc gamma RIIa, FcR beta (Fc Epsilon Rib), CD3 gamma, CD3 delta, CD3 epsilon, CD79a, CD79b, DAP10, and DAP12, or a functional variant thereof. In one embodiment, a CAR of the invention comprises an intracellular signaling domain, e.g., a primary signaling domain of CD3-zeta, or a functional variant thereof.

[0628] In one embodiment, a primary signaling domain comprises a modified ITAM domain, e.g., a mutated ITAM domain which has altered (e.g., increased or decreased) activity as compared to the native ITAM domain. In one embodiment, a primary signaling domain comprises a modified ITAM-containing primary intracellular signaling domain, e.g., an optimized and/or truncated ITAM-containing primary intracellular signaling domain. In an embodiment, a primary signaling domain comprises one, two, three, four or more ITAM motifs.

[0629] The intracellular signalling domain of the CAR can comprise the CD3-zeta signaling domain by itself or it can be combined with any other desired intracellular signaling domain(s) useful in the context of a CAR of the invention. For example, the intracellular signaling domain of the CAR can comprise a CD3 zeta chain portion and a costimulatory signaling domain. The costimulatory signaling domain refers to a portion of the CAR comprising the intracellular domain of a costimulatory molecule. A costimulatory molecule is a cell surface molecule other than an antigen receptor or its ligands that is required for an efficient response of lymphocytes to an antigen. Examples of such molecules include CD27, CD28, 4-1BB (CD137), OX40, CD28-OX40, CD28-4-1BB, CD30, CD40, PD-1, ICOS, lymphocyte function-associated antigen-1 (LFA-1), CD2, CD7, LIGHT, NKG2C, B7-H3, and a ligand that specifically binds with CD83, and the like. For example, CD27 costimulation has been demonstrated to enhance expansion, effector function, and survival of human CART cells in vitro and augments human T cell persistence and antitumor activity in vivo (Song et al. Blood. 2012; 119(3):696-706). Further examples of such costimulatory molecules include CDS, ICAM-1, GITR, BAFFR, HVEM (LIGHTR), SLAMF7, NKp80 (KLRF1), NKp44, NKp30, NKp46, CD160, CD19, CD4, CD8alpha, CD8beta, IL2R beta, IL2R gamma, IL7R alpha, ITGA4, VLA1, CD49a, ITGA4, IA4, CD49D, ITGA6, VLA-6, CD49f, ITGAD, CD11d, ITGAE, CD103, ITGAL, CD11a, LFA-1, ITGAM, CD11b, ITGAX, CD11c, ITGB1, CD29, ITGB2, CD18, LFA-1, ITGB7, TNFR2, TRANCE/RANKL, DNAM1 (CD226), SLAMF4 (CD244, 2B4), CD84, CD96 (Tactile), NKG2D, CEACAM1, CRTAM, Ly9 (CD229), CD160 (BY55), PSGL1, CD100 (SEMA4D), CD69, SLAMF6 (NTB-A, Ly108), SLAM (SLAMF1, CD150, IPO-3), BLAME (SLAMF8), SELPLG (CD162), LTBR, LAT, GADS, SLP-76, PAG/Cbp, and CD19a.

[0630] The intracellular signaling sequences within the cytoplasmic portion of the CAR of the invention may be linked to each other in a random or specified order. Optionally, a short oligo- or polypeptide linker, for example, between 2 and 10 amino acids (e.g., 2, 3, 4, 5, 6, 7, 8, 9, or 10 amino acids) in length may form the linkage between intracellular signaling sequence. In one embodiment, a glycine-serine doublet can be used as a suitable linker. In one embodiment, a single amino acid, e.g., an alanine, a glycine, can be used as a suitable linker.

[0631] In one aspect, the intracellular signaling domain is designed to comprise two or more, e.g., 2, 3, 4, 5, or more, costimulatory signaling domains. In an embodiment, the two or more, e.g., 2, 3, 4, 5, or more, costimulatory signaling domains, are separated by a linker molecule, e.g., a linker molecule described herein. In one embodiment, the intracellular signaling domain comprises two costimulatory signaling domains. In some embodiments, the linker molecule is a glycine residue. In some embodiments, the linker is an alanine residue.

[0632] In one aspect, the intracellular signaling domain is designed to comprise the signaling domain of CD3-zeta and the signaling domain of CD28, or a functional variant thereof. In one aspect, the intracellular signaling domain is designed to comprise the signaling domain of CD3-zeta, the signalling domain of CD28, and the signaling domain of 4-1BB, or a functional variant thereof. In one aspect, the signaling domain of 4-1BB is a signaling domain of SEQ ID NO: 14. In one aspect, the signaling domain of CD3-zeta is a signaling domain of SEQ ID NO: 18. In one aspect, the signaling domain of CD28 is selected from SEQ ID NOs: 427-430, as described herein.

[0633] In one aspect, the intracellular signaling domain is designed to comprise the signaling domain of CD3-zeta, the signaling domain of CD28, and the signaling domain of CD27, or a functional variant thereof. In one aspect, the signaling domain of CD27 comprises an amino acid sequence of QRRKYRSNKGESPVEPAEPCRYSCPREEEGSTIPIQEDYRKPEPACSP (SEQ ID NO: 16). In one aspect, the signalling domain of CD27 is encoded by a nucleic acid sequence of AGGAGTAAGAGGAGCAGGCTCCTGCACAGTGACTACATGAACATGACTCCCCG CCGCCCCGGGCCCACCCGCAAGCATTACCAGCCCTATGCCCCACCACGCGACTT CGCAGCCTATCGCTCC (SEQ ID NO:17).

[0634] In one aspect, the CAR-expressing cell described herein can further comprise a second CAR, e.g., a second CAR that includes a different antigen binding domain, e.g., to the same target or a different target (e.g., a target other than a cancer associated antigen described herein or a different cancer associated antigen described herein). In one embodiment, the second CAR includes an antigen binding domain to a target expressed the same cancer cell type as the cancer associated antigen. In one embodiment, the CAR-expressing cell comprises a first CAR that targets a first antigen and includes an intracellular signaling domain having a costimulatory signaling domain but not a primary signaling domain, and a second CAR that targets a second, different, antigen and includes an intracellular signaling domain having a primary signaling domain but not a costimulatory signaling domain. While not wishing to be bound by theory, placement of a costimulatory signaling domain, e.g., 4-1BB, CD28, CD27 or OX-40, onto the first CAR, and the primary signaling domain, e.g., CD3 zeta, on the second CAR can limit the CAR activity to cells where both targets are expressed. In one embodiment, the CAR expressing cell comprises a first cancer associated antigen CAR that includes an antigen binding domain that binds a target antigen described herein, a transmembrane domain and a costimulatory domain and a second CAR that targets a different target antigen (e.g., an antigen expressed on that same cancer cell type as the first target antigen) and includes an antigen binding domain, a transmembrane domain and a primary signaling domain. In another embodiment, the CAR expressing cell comprises a first CAR that includes an antigen binding domain that binds a target antigen described herein, a transmembrane domain and a primary signaling domain and a second CAR that targets an antigen other than the first target antigen (e.g., an antigen expressed on the same cancer cell type as the first target antigen) and includes an antigen binding domain to the antigen, a transmembrane domain and a costimulatory signaling domain.

[0635] In one embodiment, the CAR-expressing cell comprises an XCAR described herein and an inhibitory CAR. In one embodiment, the inhibitory CAR comprises an antigen binding domain that binds an antigen found on normal cells but not cancer cells, e.g., normal cells that also express CLL. In one embodiment, the inhibitory CAR comprises the antigen binding domain, a transmembrane domain and an intracellular domain of an inhibitory molecule. For example, the intracellular domain of the inhibitory CAR can be an intracellular domain of PD1, PD-L1, CTLA4, TIM3, CEACAM (e.g., CEACAM-1, CEACAM-3 and/or CEACAM-5), LAG3, VISTA, BTLA, TIGIT, LAIR1, CD160, 2B4 or TGF beta.

[0636] In one embodiment, when the CAR-expressing cell comprises two or more different CARs, the antigen binding domains of the different CARs can be such that the antigen binding domains do not interact with one another. For example, a cell expressing a first and second CAR can have an antigen binding domain of the first CAR, e.g., as a fragment, e.g., an scFv, that does not form an association with the antigen binding domain of the second CAR, e.g., the antigen binding domain of the second CAR is a VHH.

[0637] In some embodiments, the antigen binding domain comprises a single domain antigen binding (SDAB) molecules include molecules whose complementary determining regions are part of a single domain polypeptide. Examples include, but are not limited to, heavy chain variable domains, binding molecules naturally devoid of light chains, single domains derived from conventional 4-chain antibodies, engineered domains and single domain scaffolds other than those derived from antibodies. SDAB molecules may be any of the art, or any future single domain molecules. SDAB molecules may be derived from any species including, but not limited to mouse, human, camel, llama, lamprey, fish, shark, goat, rabbit, and bovine. This term also includes naturally occurring single domain antibody molecules from species other than Camelidae and sharks.

[0638] In one aspect, an SDAB molecule can be derived from a variable region of the immunoglobulin found in fish, such as, for example, that which is derived from the immunoglobulin isotype known as Novel Antigen Receptor (NAR) found in the serum of shark. Methods of producing single domain molecules derived from a variable region of NAR (“IgNARs”) are described in WO 03/014161 and Streltsov (2005) Protein Sci. 14:2901-2909.

[0639] According to another aspect, an SDAB molecule is a naturally occurring single domain antigen binding molecule known as heavy chain devoid of light chains. Such single domain molecules are disclosed in WO 9404678 and Hamers-Casterman, C. et al. (1993) Nature 363:446-448, for example. For clarity reasons, this variable domain derived from a heavy chain molecule naturally devoid of light chain is known herein as a VHH or nanobody to distinguish it from the conventional VH of four chain immunoglobulins. Such a VHH molecule can be derived from Camelidae species, for example in camel, llama, dromedary, alpaca and guanaco. Other species besides Camelidae may produce heavy chain molecules naturally devoid of light chain; such VHHs are within the scope of the invention.

[0640] The SDAB molecules can be recombinant, CDR-grafted, humanized, camelized, de-immunized and/or in vitro generated (e.g., selected by phage display).

[0641] It has also been discovered, that cells having a plurality of chimeric membrane embedded receptors comprising an antigen binding domain that interactions between the antigen binding domain of the receptors can be undesirable, e.g., because it inhibits the ability of one or more of the antigen binding domains to bind its cognate antigen. Accordingly, disclosed herein are cells having a first and a second non-naturally occurring chimeric membrane embedded receptor comprising antigen binding domains that minimize such interactions. Also disclosed herein are nucleic acids encoding a first and a second non-naturally occurring chimeric membrane embedded receptor comprising antigen binding domains that minimize such interactions, as well as methods of making and using such cells and nucleic acids. In an embodiment the antigen binding domain of one of said first said second non-naturally occurring chimeric membrane embedded receptor, comprises an scFv, and the other comprises a single VH domain, e.g., a camelid, shark, or lamprey single VH domain, or a single VH domain derived from a human or mouse sequence.

[0642] In some embodiments, the claimed invention comprises a first and second CAR, wherein the antigen binding domain of one of said first CAR said second CAR does not comprise a variable light domain and a variable heavy domain. In some embodiments, the antigen binding domain of one of said first CAR said second CAR is an scFv, and the other is not an scFv. In some embodiments, the antigen binding domain of one of said first CAR said second CAR comprises a single VH domain, e.g., a camelid, shark, or lamprey single VH domain, or a single VH domain derived from a human or mouse sequence. In some embodiments, the antigen binding domain of one of said first CAR said second CAR comprises a nanobody. In some embodiments, the antigen binding domain of one of said first CAR said second CAR comprises a camelid VHH domain.

[0643] In some embodiments, the antigen binding domain of one of said first CAR said second CAR comprises an scFv, and the other comprises a single VH domain, e.g., a camelid, shark, or lamprey single VH domain, or a single VH domain derived from a human or mouse sequence. In some embodiments, the antigen binding domain of one of said first CAR said second CAR comprises an scFv, and the other comprises a nanobody. In some embodiments, the antigen binding domain of one of said first CAR said second CAR comprises an scFv, and the other comprises a camelid VHH domain.

[0644] In some embodiments, when present on the surface of a cell, binding of the antigen binding domain of said first CAR to its cognate antigen is not substantially reduced by the presence of said second CAR. In some embodiments, binding of the antigen binding domain of said first CAR to its cognate antigen in the presence of said second CAR is 85%, 90%, 95%, 96%, 97%, 98% or 99% of binding of the antigen binding domain of said first CAR to its cognate antigen in the absence of said second CAR.

[0645] In some embodiments, when present on the surface of a cell, the antigen binding domains of said first CAR said second CAR, associate with one another less than if both were scFv antigen binding domains. In some embodiments, the antigen binding domains of said first CAR said second CAR, associate with one another 85%, 90%, 95%, 96%, 97%, 98% or 99% less than if both were scFv antigen binding domains.

[0646] In another aspect, the CAR-expressing cell described herein can further express another agent, e.g., an agent which enhances the activity of a CAR-expressing cell. For example, in one embodiment, the agent can be an agent which inhibits an inhibitory molecule. Inhibitory molecules, e.g., PD1, can, in some embodiments, decrease the ability of a CAR-expressing cell to mount an immune effector response. Examples of inhibitory molecules include PD1, PD-L1, CTLA4, TIM3, CEACAM (e.g., CEACAM-1, CEACAM-3 and/or CEACAM-5), LAG3, VISTA, BTLA, TIGIT, LAIR1, CD160, 2B4 and TGF beta. In one embodiment, the agent which inhibits an inhibitory molecule, e.g., is a molecule described herein, e.g., an agent that comprises a first polypeptide, e.g., an inhibitory molecule, associated with a second polypeptide that provides a positive signal to the cell, e.g., an intracellular signaling domain described herein. In one embodiment, the agent comprises a first polypeptide, e.g., of an inhibitory molecule such as PD1, PD-L1, CTLA4, TIM3, CEACAM (e.g., CEACAM-1, CEACAM-3 and/or CEACAM-5), LAG3, VISTA, BTLA, TIGIT, LAIR1, CD160, 2B4 or TGF beta, or a fragment of any of these (e.g., at least a portion of an extracellular domain of any of these), and a second polypeptide which is an intracellular signaling domain described herein (e.g., comprising a costimulatory domain (e.g., 41BB, CD27 or CD28, e.g., as described herein) and/or a primary signaling domain (e.g., a CD3 zeta signaling domain described herein). In one embodiment, the agent comprises a first polypeptide of PD1 or a fragment thereof (e.g., at least a portion of an extracellular domain of PD1), and a second polypeptide of an intracellular signaling domain described herein (e.g., a CD28 signaling domain described herein and/or a CD3 zeta signaling domain described herein). PD1 is an inhibitory member of the CD28 family of receptors that also includes CD28, CTLA-4, ICOS, and BTLA. PD-1 is expressed on activated B cells, T cells and myeloid cells (Agata et al. 1996 Int. Immunol 8:765-75). Two ligands for PD1, PD-L1 and PD-L2 have been shown to downregulate T cell activation upon binding to PD1 (Freeman et a. 2000 J Exp Med 192:1027-34; Latchman et al. 2001 Nat Immunol 2:261-8; Carter et al. 2002 Eur J Immunol 32:634-43). PD-L1 is abundant in human cancers (Dong et al. 2003 J Mol Med 81:281-7; Blank et al. 2005 Cancer Immunol. Immunother 54:307-314; Konishi et al. 2004 Clin Cancer Res 10:5094). Immune suppression can be reversed by inhibiting the local interaction of PD1 with PD-L1.

[0647] In one embodiment, the agent comprises the extracellular domain (ECD) of an inhibitory molecule, e.g., Programmed Death 1 (PD1), fused to a transmembrane domain and intracellular signaling domains such as 41BB and CD3 zeta (also referred to herein as a PD1 CAR). In one embodiment, the PD1 CAR, when used in combinations with a XCAR described herein, improves the persistence of the T cell. In one embodiment, the CAR is a PD1 CAR comprising the extracellular domain of PD1 indicated as underlined in SEQ ID NO: 26. In one embodiment, the PD1 CAR comprises the amino acid sequence of SEQ ID NO:26.

(SEQ ID NO: 26)
Malpvtalllplalllhaarppgwfldspdrpwnpptfspallvvtegdn
atftcsfsntsesfvlnwyrmspsnqtdklaafpedrsqpgqdcrfrvtq
lpngrdfhmsvvrarrndsgtylcgaislapkaqikeslraelrvterra
evptahpspsprpagqfqtlvtttpaprpptpaptiasqplslrpeacrp
aaggavhtrgldfacdiyiwaplagtcgvlllslvitlyckrgrkkllyi
fkqpfmrpvqttqeedgcscrfpeeeeggcelrvkfsrsadapaykqgqn
qlynelnlgrreeydvldkrrgrdpemggkprrknpqeglynelqkdkma
eayseigmkgerrrgkghdglyqglstatkdtydalhmqalppr.

[0648] In one embodiment, the PD1 CAR comprises the amino acid sequence provided below (SEQ ID NO:39).

(SEQ ID NO: 39)
pgwfldspdrpwnpptfspallvvtegdnatftcsfsntsesfvlnwyrm
spsnqtdklaafpedrsqpgqdcrfrvtqlpngrdfhmsvvrarrndsgt
ylcgaislapkaqikeslraelrvterraevptahpspsprpagqfqtlv
tttpaprpptpaptiasqplslrpeacrpaaggavhtrgldfacdiyiwa
plagtcgvlllslvitlyckrgrkkllyifkqpfmrpvqttqeedgescr
fpeeeeggcelrvkfsrsadapaykqgqnqlynelnlgrreeydvldkrr
grdpemggkprrknpqeglynelqkdkmaeayseigmkgerrrgkghdgl
yqglstatkdtydalhmqalppr.

[0649] In one embodiment, the agent comprises a nucleic acid sequence encoding the PD1 CAR, e.g., the PD1 CAR described herein. In one embodiment, the nucleic acid sequence for the PD1 CAR is shown below, with the PD1 ECD underlined below in SEQ ID NO: 27

(SEQ ID NO: 27)
atggccctccctgtcactgccctgcttctccccctcgcactcctgctcca
cgccgctagaccacccggatggtttctggactctccggatcgcccgtgga
atcccccaaccttctcaccggcactcttggttgtgactgagggcgataat
gcgaccttcacgtgctcgttctccaacacctccgaatcattcgtgctgaa
ctggtaccgcatgagcccgtcaaaccagaccgacaagctcgccgcgtttc
cggaagatcggtcgcaaccgggacaggattgtcggttccgcgtgactcaa
ctgccgaatggcagagacttccacatgagcgtggtccgcgctaggcgaaa
cgactccgggacctacctgtgcggagccatctcgctggcgcctaaggccc
aaatcaaagagagcttgagggccgaactgagagtgaccgagcgcagagct
gaggtgccaactgcacatccatccccatcgcctcggcctgcggggcagtt
tcagaccctggtcacgaccactccggcgccgcgcccaccgactccggccc
caactatcgcgagccagcccctgtcgctgaggccggaagcatgccgccct
gccgccggaggtgctgtgcatacccggggattggacttcgcatgcgacat
ctacatttgggctcctctcgccggaacttgtggcgtgctccttctgtccc
tggtcatcaccctgtactgcaagcggggtcggaaaaagcttctgtacatt
ttcaagcagcccttcatgaggcccgtgcaaaccacccaggaggaggacgg
ttgctcctgccggttccccgaagaggaagaaggaggttgcgagctgcgcg
tgaagttctcccggagcgccgacgcccccgcctataagcagggccagaac
cagctgtacaacgaactgaacctgggacggcgggaagagtacgatgtgct
ggacaagcggcgcggccgggaccccgaaatggggggaagcctagaagaaa
gaaccctcaggaaggcctgtataacgagctgcagaaggacaagatggccg
aggcctactccgaaattgggatgaagggagagcggcggaggggaaagggg
cacgacggcctgtaccaaggactgtccaccgccaccaaggacacatacga
tgccctgcacatgcaggcccttccccctcgc.

[0650] In another aspect, the present invention provides a population of CAR-expressing cells, e.g., CART cells. In some embodiments, the population of CAR-expressing cells comprises a mixture of cells expressing different CARs. For example, in one embodiment, the population of CART cells can include a first cell expressing a CAR having an antigen binding domain to a cancer associated antigen described herein, and a second cell expressing a CAR having a different antigen binding domain, e.g., an antigen binding domain to a different a cancer associated antigen described herein, e.g., an antigen binding domain to a cancer associated antigen described herein that differs from the cancer associated antigen bound by the antigen binding domain of the CAR expressed by the first cell. As another example, the population of CAR-expressing cells can include a first cell expressing a CAR that includes an antigen binding domain to a cancer associated antigen described herein, and a second cell expressing a CAR that includes an antigen binding domain to a target other than a cancer associated antigen as described herein. In one embodiment, the population of CAR-expressing cells includes, e.g., a first cell expressing a CAR that includes a primary intracellular signaling domain, and a second cell expressing a CAR that includes a secondary signaling domain.

[0651] In another aspect, the present invention provides a population of cells wherein at least one cell in the population expresses a CAR having an antigen binding domain to a cancer associated antigen described herein, and a second cell expressing another agent, e.g., an agent which enhances the activity of a CAR-expressing cell. For example, in one embodiment, the agent can be an agent which inhibits an inhibitory molecule. Inhibitory molecules, e.g., PD-1, can, in some embodiments, decrease the ability of a CAR-expressing cell to mount an immune effector response. Examples of inhibitory molecules include PD-1, PD-L1, CTLA4, TIM3, CEACAM (e.g., CEACAM-1, CEACAM-3 and/or CEACAM-5), LAG3, VISTA, BTLA, TIGIT, LAIR1, CD160, 2B4 and TGF beta. In one embodiment, the agent which inhibits an inhibitory molecule, e.g., is a molecule described herein, e.g., an agent that comprises a first polypeptide, e.g., an inhibitory molecule, associated with a second polypeptide that provides a positive signal to the cell, e.g., an intracellular signaling domain described herein. In one embodiment, the agent comprises a first polypeptide, e.g., of an inhibitory molecule such as PD-1, PD-L1, CTLA4, TIM3, CEACAM (e.g., CEACAM-1, CEACAM-3 and/or CEACAM-5), LAG3, VISTA, BTLA, TIGIT, LAIR1, CD160, 2B4 or TGF beta, or a fragment of any of these, and a second polypeptide which is an intracellular signaling domain described herein (e.g., comprising a costimulatory domain (e.g., 41BB, CD27, OX40 or CD28, e.g., as described herein) and/or a primary signaling domain (e.g., a CD3 zeta signaling domain described herein). In one embodiment, the agent comprises a first polypeptide of PD-1 or a fragment thereof, and a second polypeptide of an intracellular signaling domain described herein (e.g., a CD28 signaling domain described herein and/or a CD3 zeta signaling domain described herein).

[0652] In one aspect, the present invention provides methods comprising administering a population of CAR-expressing cells, e.g., CART cells, e.g., a mixture of cells expressing different CARs, in combination with another agent, e.g., a kinase inhibitor, such as a kinase inhibitor described herein. In another aspect, the present invention provides methods comprising administering a population of cells wherein at least one cell in the population expresses a CAR having an antigen binding domain of a cancer associated antigen described herein, and a second cell expressing another agent, e.g., an agent which enhances the activity of a CAR-expressing cell, in combination with another agent, e.g., a kinase inhibitor, such as a kinase inhibitor described herein.

### Regulatable Chimeric Antigen Receptors

[0653] In some embodiments, a regulatable CAR (RCAR) where the CAR activity can be controlled is desirable to optimize the safety and efficacy of a CAR therapy. There are many ways CAR activities can be regulated. For example, inducible apoptosis using, e.g., a caspase fused to a dimerization domain (see, e.g., Di et al., N Egnl. J. Med. 2011 Nov. 3; 365(18):1673-1683), can be used as a safety switch in the CAR therapy of the instant invention. In an aspect, a RCAR comprises a set of polypeptides, typically two in the simplest embodiments, in which the components of a standard CAR described herein, e.g., an antigen binding domain and an intracellular signaling domain, are partitioned on separate polypeptides or members. In some embodiments, the set of polypeptides include a dimerization switch that, upon the presence of a dimerization molecule, can couple the polypeptides to one another, e.g., can couple an antigen binding domain to an intracellular signaling domain.

[0654] In an aspect, an RCAR comprises two polypeptides or members: 1) an intracellular signaling member comprising an intracellular signaling domain, e.g., a primary intracellular signaling domain described herein, and a first switch domain; 2) an antigen binding member comprising an antigen binding domain, e.g., that targets a tumor antigen described herein, as described herein and a second switch domain. Optionally, the RCAR comprises a transmembrane domain described herein. In an embodiment, a transmembrane domain can be disposed on the intracellular signaling member, on the antigen binding member, or on both. (Unless otherwise indicated, when members or elements of an RCAR are described herein, the order can be as provided, but other orders are included as well. In other words, in an embodiment, the order is as set out in the text, but in other embodiments, the order can be different. E.g., the order of elements on one side of a transmembrane region can be different from the example, e.g., the placement of a switch domain relative to a intracellular signaling domain can be different, e.g., reversed).

[0655] In an embodiment, the first and second switch domains can form an intracellular or an extracellular dimerization switch. In an embodiment, the dimerization switch can be a homodimerization switch, e.g., where the first and second switch domain are the same, or a heterodimerization switch, e.g., where the first and second switch domain are different from one another.

[0656] In embodiments, an RCAR can comprise a “multi switch.” A multi switch can comprise heterodimerization switch domains or homodimerization switch domains. A multi switch comprises a plurality of, e.g., 2, 3, 4, 5, 6, 7, 8, 9, or 10, switch domains, independently, on a first member, e.g., an antigen binding member, and a second member, e.g., an intracellular signaling member. In an embodiment, the first member can comprise a plurality of first switch domains, e.g., FKBP-based switch domains, and the second member can comprise a plurality of second switch domains, e.g., FRB-based switch domains. In an embodiment, the first member can comprise a first and a second switch domain, e.g., a FKBP-based switch domain and a FRB-based switch domain, and the second member can comprise a first and a second switch domain, e.g., a FKBP-based switch domain and a FRB-based switch domain.

[0657] In an embodiment, the intracellular signaling member comprises one or more intracellular signaling domains, e.g., a primary intracellular signaling domain and one or more costimulatory signaling domains.

[0658] In an embodiment, the antigen binding member may comprise one or more intracellular signaling domains, e.g., one or more costimulatory signaling domains. In an embodiment, the antigen binding member comprises a plurality, e.g., 2 or 3 costimulatory signaling domains described herein, e.g., selected from 41BB, CD28, CD27, ICOS, and OX40, and in embodiments, no primary intracellular signaling domain. In an embodiment, the antigen binding member comprises the following costimulatory signaling domains, from the extracellular to intracellular direction: 41BB-CD27; 41BB-CD27; CD27-41BB; 41BB-CD28; CD28-41BB; OX40-CD28; CD28-OX40; CD28-41BB; or 41BB-CD28. In such embodiments, the intracellular binding member comprises a CD3zeta domain. In one such embodiment the RCAR comprises (1) an antigen binding member comprising, an antigen binding domain, a transmembrane domain, and two costimulatory domains and a first switch domain; and (2) an intracellular signaling domain comprising a transmembrane domain or membrane tethering domain and at least one primary intracellular signaling domain, and a second switch domain.

[0659] An embodiment provides RCARs wherein the antigen binding member is not tethered to the surface of the CAR cell. This allows a cell having an intracellular signaling member to be conveniently paired with one or more antigen binding domains, without transforming the cell with a sequence that encodes the antigen binding member. In such embodiments, the RCAR comprises: 1) an intracellular signaling member comprising: a first switch domain, a transmembrane domain, an intracellular signaling domain, e.g., a primary intracellular signaling domain, and a first switch domain; and 2) an antigen binding member comprising: an antigen binding domain, and a second switch domain, wherein the antigen binding member does not comprise a transmembrane domain or membrane tethering domain, and, optionally, does not comprise an intracellular signaling domain. In some embodiments, the RCAR may further comprise 3) a second antigen binding member comprising: a second antigen binding domain, e.g., a second antigen binding domain that binds a different antigen than is bound by the antigen binding domain; and a second switch domain.

[0660] Also provided herein are RCARs wherein the antigen binding member comprises bispecific activation and targeting capacity. In this embodiment, the antigen binding member can comprise a plurality, e.g., 2, 3, 4, or 5 antigen binding domains, e.g., scFvs, wherein each antigen binding domain binds to a target antigen, e.g. different antigens or the same antigen, e.g., the same or different epitopes on the same antigen. In an embodiment, the plurality of antigen binding domains are in tandem, and optionally, a linker or hinge region is disposed between each of the antigen binding domains. Suitable linkers and hinge regions are described herein.

[0661] An embodiment provides RCARs having a configuration that allows switching of proliferation. In this embodiment, the RCAR comprises: 1) an intracellular signaling member comprising: optionally, a transmembrane domain or membrane tethering domain; one or more co-stimulatory signaling domain, e.g., selected from 41BB, CD28, CD27, ICOS, and OX40, and a switch domain; and 2) an antigen binding member comprising: an antigen binding domain, a transmembrane domain, and a primary intracellular signaling domain, e.g., a CD3zeta domain, wherein the antigen binding member does not comprise a switch domain, or does not comprise a switch domain that dimerizes with a switch domain on the intracellular signaling member. In an embodiment, the antigen binding member does not comprise a co-stimulatory signaling domain. In an embodiment, the intracellular signaling member comprises a switch domain from a homodimerization switch. In an embodiment, the intracellular signaling member comprises a first switch domain of a heterodimerization switch and the RCAR comprises a second intracellular signaling member which comprises a second switch domain of the heterodimerization switch. In such embodiments, the second intracellular signaling member comprises the same intracellular signaling domains as the intracellular signaling member. In an embodiment, the dimerization switch is intracellular. In an embodiment, the dimerization switch is extracellular.

[0662] In any of the RCAR configurations described here, the first and second switch domains comprise a FKBP—FRB based switch as described herein.

[0663] Also provided herein are cells comprising an RCAR described herein. Any cell that is engineered to express a RCAR can be used as a RCARX cell. In an embodiment the RCARX cell is a T cell, and is referred to as a RCART cell. In an embodiment the RCARX cell is an NK cell, and is referred to as a RCARN cell.

[0664] Also provided herein are nucleic acids and vectors comprising RCAR encoding sequences. Sequence encoding various elements of an RCAR can be disposed on the same nucleic acid molecule, e.g., the same plasmid or vector, e.g., viral vector, e.g., lentiviral vector. In an embodiment, (i) sequence encoding an antigen binding member and (ii) sequence encoding an intracellular signaling member, can be present on the same nucleic acid, e.g., vector. Production of the corresponding proteins can be achieved, e.g., by the use of separate promoters, or by the use of a bicistronic transcription product (which can result in the production of two proteins by cleavage of a single translation product or by the translation of two separate protein products). In an embodiment, a sequence encoding a cleavable peptide, e.g., a P2A or F2A sequence, is disposed between (i) and (ii). In an embodiment, a sequence encoding an IRES, e.g., an EMCV or EV71 IRES, is disposed between (i) and (ii). In these embodiments, (i) and (ii) are transcribed as a single RNA. In an embodiment, a first promoter is operably linked to (i) and a second promoter is operably linked to (ii), such that (i) and (ii) are transcribed as separate mRNAs.

[0665] Alternatively, the sequence encoding various elements of an RCAR can be disposed on the different nucleic acid molecules, e.g., different plasmids or vectors, e.g., viral vector, e.g., lentiviral vector. E.g., the (i) sequence encoding an antigen binding member can be present on a first nucleic acid, e.g., a first vector, and the (ii) sequence encoding an intracellular signaling member can be present on the second nucleic acid, e.g., the second vector.

### Dimerization Switches

[0666] Dimerization switches can be non-covalent or covalent. In a non-covalent dimerization switch, the dimerization molecule promotes a non-covalent interaction between the switch domains. In a covalent dimerization switch, the dimerization molecule promotes a covalent interaction between the switch domains.

[0667] In an embodiment, the RCAR comprises a FKBP/FRAP, or FKBP/FRB,-based dimerization switch. FKBP12 (FKBP, or FK506 binding protein) is an abundant cytoplasmic protein that serves as the initial intracellular target for the natural product immunosuppressive drug, rapamycin. Rapamycin binds to FKBP and to the large PI3K homolog FRAP (RAFT, mTOR). FRB is a 93 amino acid portion of FRAP, that is sufficient for binding the FKBP-rapamycin complex (Chen, J., Zheng, X. F., Brown, E. J. & Schreiber, S. L. (1995) Identification of an 11-kDa FKBP12-rapamycin-binding domain within the 289-kDa FKBP12-rapamycin-associated protein and characterization of a critical serine residue. Proc Natl Acad Sci USA 92: 4947-51.)

[0668] In embodiments, an FKBP/FRAP, e.g., an FKBP/FRB, based switch can use a dimerization molecule, e.g., rapamycin or a rapamycin analog.

[0669] The amino acid sequence of FKBP is as follows:

(SEQ ID NO: 52)
D V P D Y A S L G G P S S P K K K R K V S R G V Q
V E T I S P G D G R T F P K R G Q T C V V H Y T G
M L E D G K K F D S S R D R N K P F K F M L G K Q
E V I R G W E E G V A Q M S V G Q R A K L T I S P
D Y A Y G A T G H P G I I P P H A T L V F D V E L
L K L E T S Y

[0670] In embodiments, an FKBP switch domain can comprise a fragment of FKBP having the ability to bind with FRB, or a fragment or analog thereof, in the presence of rapamycin or a rapalog, e.g., the underlined portion of SEQ ID NO: 52, which is:

(SEQ ID NO: 53)
V Q V E T I S P G D G R T F P K R G Q T C V V H Y
T G M L E D G K K F D S S R D R N K P F K F M L G
K Q E V I R G W E E G V A Q M S V G Q R A K L T I
S P D Y A Y G A T G H P G I I P P H A T L V F D V
E L L K L E T S

[0671] The amino acid sequence of FRB is as follows:

(SEQ ID NO: 54)
[sequence omitted]

[0672] “FKBP/FRAP, e.g., an FKBP/FRB, based switch” as that term is used herein, refers to a dimerization switch comprising: a first switch domain, which comprises an FKBP fragment or analog thereof having the ability to bind with FRB, or a fragment or analog thereof, in the presence of rapamycin or a rapalog, e.g., RAD001, and has at least 70, 75, 80, 85, 90, 95, 96, 97, 98, or 99% identity with, or differs by no more than 30, 25, 20, 15, 10, 5, 4, 3, 2, or 1 amino acid residues from, the FKBP sequence of SEQ ID NO: 52 or 53; and a second switch domain, which comprises an FRB fragment or analog thereof having the ability to bind with FRB, or a fragment or analog thereof, in the presence of rapamycin or a rapalog, and has at least 70, 75, 80, 85, 90, 95, 96, 97, 98, or 99% identity with, or differs by no more than 30, 25, 20, 15, 10, 5, 4, 3, 2, or 1 amino acid residues from, the FRB sequence of SEQ ID NO: 54. In an embodiment, a RCAR described herein comprises one switch domain comprises amino acid residues disclosed in SEQ ID NO: 52 (or SEQ ID NO: 53), and one switch domain comprises amino acid residues disclosed in SEQ ID NO: 54.

[0673] In embodiments, the FKBP/FRB dimerization switch comprises a modified FRB switch domain that exhibits altered, e.g., enhanced, complex formation between an FRB-based switch domain, e.g., the modified FRB switch domain, a FKBP-based switch domain, and the dimerization molecule, e.g., rapamycin or a rapalogue, e.g., RAD001. In an embodiment, the modified FRB switch domain comprises one or more mutations, e.g., 2, 3, 4, 5, 6, 7, 8, 9, 10 or more, selected from mutations at amino acid position(s) L2031, E2032, 52035, R2036, F2039, G2040, T2098, W2101, D2102, Y2105, and F2108, where the wild-type amino acid is mutated to any other naturally-occurring amino acid. In an embodiment, a mutant FRB comprises a mutation at E2032, where E2032 is mutated to phenylalanine (E2032F), methionine (E2032M), arginine (E2032R), valine (E2032V), tyrosine (E2032Y), isoleucine (E2032I), e.g., SEQ ID NO: 55, or leucine (E2032L), e.g., SEQ ID NO: 56. In an embodiment, a mutant FRB comprises a mutation at T2098, where T2098 is mutated to phenylalanine (T2098F) or leucine (T2098L), e.g., SEQ ID NO: 57. In an embodiment, a mutant FRB comprises a mutation at E2032 and at T2098, where E2032 is mutated to any amino acid, and where T2098 is mutated to any amino acid, e.g., SEQ ID NO: 58. In an embodiment, a mutant FRB comprises an E2032I and a T2098L mutation, e.g., SEQ ID NO: 59. In an embodiment, a mutant FRB comprises an E2032L and a T2098L mutation, e.g., SEQ ID NO: 60.

TABLE 4
Exemplary mutant FRB having increased affinity for a dimerization molecule.

| | | SEQ |
|---|---|---|
| | | ID |
| FRB mutant | Amino Acid Sequence | NO: |
| E2032I mutant | ILWHEMWHEGLIEASRLYFGERNVKGMFEVLEPLHAMMERGPQTLKETSEN | 55 |
| | QAYGRDLMEAQEWCRKYMKSGNVKDLTQAWDLYYHVERRISKTS | |
| E2032L mutant | ILWHEMWHEGLLEASRLYFGERNVKGMFEVLEPLHAMMERGPQTLKETSEN | 56 |
| | QAYGRDLMEAQEWCRKYMKSGNVKDLTQAWDLYYHVERRISKTS | |
| T2098L mutant | ILWHEMWHEGLEEASRLYFGERNVKGMFEVLEPLHAMMERGPQTLKETSEN | 57 |
| | QAYGRDLMEAQEWCRKYMKSGNVKDLLQAWDLYYHVERRISKTS | |
| E2032, T2098 | ILWHEMWHEGLXEASRLYFGERNVKGMFEVLEPLHAMMERGPQTLKETSEN | 58 |
| mutant | QAYGRDLMEAQEWCRKYMKSGNVKDLXQAWDLYYHVERRISKTS | |
| E2032I, T2098L | ILWHEMWHEGLIEASRLYFGERNVKGMFEVLEPLHAMMERGPQTLKETSEN | 59 |
| mutant | QAYGRDLMEAQEWCRKYMKSGNVKDLLQAWDLYYHVERRISKTS | |
| E2032L, T2098L | ILWHEMWHEGLLEASRLYFGERNVKGMFEVLEPLHAMMERGPQTLKETSEN | 60 |
| mutant | QAYGRDLMEAQEWCRKYMKSGNVKDLLQAWDLYYHVERRISKTS | |

[0674] Other suitable dimerization switches include a GyrB-GyrB based dimerization switch, a Gibberellin-based dimerization switch, a tag/binder dimerization switch, and a halo-tag/snap-tag dimerization switch. Following the guidance provided herein, such switches and relevant dimerization molecules will be apparent to one of ordinary skill.

### Dimerization Molecule

[0675] Association between the switch domains is promoted by the dimerization molecule. In the presence of dimerization molecule interaction or association between switch domains allows for signal transduction between a polypeptide associated with, e.g., fused to, a first switch domain, and a polypeptide associated with, e.g., fused to, a second switch domain. In the presence of non-limiting levels of dimerization molecule signal transduction is increased by 1.1, 1.2, 1.3, 1.4, 1.5, 1.6, 1.7, 1.8, 1.9, 2, 5, 10, 50, 100 fold, e.g., as measured in a system described herein.

[0676] Rapamycin and rapamycin analogs (sometimes referred to as rapalogues), e.g., RAD001, can be used as dimerization molecules in a FKBP/FRB-based dimerization switch described herein. In an embodiment the dimerization molecule can be selected from rapamycin (sirolimus), RAD001 (everolimus), zotarolimus, temsirolimus, AP-23573 (ridaforolimus), biolimus and AP21967. Additional rapamycin analogs suitable for use with FKBP/FRB-based dimerization switches are further described in the section entitled “Combination Therapies”, or in the subsection entitled “Exemplary mTOR inhibitors”.

### Split CAR

[0677] In some embodiments, the CAR-expressing cell uses a split CAR. The split CAR approach is described in more detail in publications WO2014/055442 and WO2014/055657. Briefly, a split CAR system comprises a cell expressing a first CAR having a first antigen binding domain and a costimulatory domain (e.g., 41BB), and the cell also expresses a second CAR having a second antigen binding domain and an intracellular signaling domain (e.g., CD3 zeta). When the cell encounters the first antigen, the costimulatory domain is activated, and the cell proliferates. When the cell encounters the second antigen, the intracellular signaling domain is activated and cell-killing activity begins. Thus, the CAR-expressing cell is only fully activated in the presence of both antigens.

### Exemplary CAR Molecules

[0678] The CAR molecules disclosed herein can comprise a binding domain that binds to a target, e.g., a target as described herein; a transmembrane domain, e.g., a transmembrane domain as described herein; and an intracellular signaling domain, e.g., an intracellular domain as described herein. In embodiments, the binding domain comprises a heavy chain complementary determining region 1 (HC CDR1), a heavy chain complementary determining region 2 (HC CDR2), and a heavy chain complementary determining region 3 (HC CDR3) of a heavy chain binding domain described herein, and/or a light chain complementary determining region 1 (LC CDR1), a light chain complementary determining region 2 (LC CDR2), and a light chain complementary determining region 3 (LC CDR3) of a light chain binding domain described herein.

[0679] In other embodiments, the CAR molecule comprises a CD19 CAR molecule described herein, e.g., a CD19 CAR molecule described in US-2015-0283178-A1, e.g., CTL019. In embodiments, the CD19 CAR comprises an amino acid, or has a nucleotide sequence shown in US-2015-0283178-A1, incorporated herein by reference, or a sequence substantially identical thereto (e.g., at least 85%, 90%, 95% or more identical thereto).

[0680] In one embodiment, the CAR T cell that specifically binds to CD19 has the USAN designation TISAGENLECLEUCEL-T. CTL019 is made by a gene modification of T cells is mediated by stable insertion via transduction with a self-inactivating, replication deficient Lentiviral (LV) vector containing the CTL019 transgene under the control of the EF-1 alpha promoter. CTL019 can be a mixture of transgene positive and negative T cells that are delivered to the subject on the basis of percent transgene positive T cells.

[0681] In other embodiments, the CD19 CAR includes a CAR molecule, or an antigen binding domain (e.g., a humanized antigen binding domain) according to Table 3 of WO2014/153270, incorporated herein by reference. The amino acid and nucleotide sequences encoding the CD19 CAR molecules and antigen binding domains (e.g., including one, two, three VH CDRs; and one, two, three VL CDRs according to Kabat or Chothia), are specified in WO2014/153270. In embodiments, the CD19 CAR comprises an amino acid, or has a nucleotide sequence shown in WO2014/153270 incorporated herein by reference, or a sequence substantially identical to any of the aforesaid sequences (e.g., at least 85%, 90%, 95% or more identical to any of the aforesaid CD19 CAR sequences).

[0682] In one embodiment, the parental murine scFv sequence is the CAR19 construct provided in PCT publication WO2012/079000 (incorporated herein by reference) and provided herein in Table 5. In one embodiment, the anti-CD19 binding domain is a scFv described in WO2012/079000 and provided herein in Table 5.

[0683] In one embodiment, the CD19 CAR comprises an amino acid sequence provided as SEQ ID NO: 12 in PCT publication WO2012/079000. In embodiment, the amino acid sequence is:
[0684] MALPVTALLLPLALLLHAARPdigmtqttsslsaslgdrvtiscrasqdiskylnwyqqkpdgtvklli yhtsrlhsgvpsrfsgsgsgtdysltisnleaediatyfcaqgntlpytfgggtkleitggggsggggsggggsevklqesgpglva psqslsvtctvsgvslpdygvswirqpprkglewlgviwgsettyynsalksrltiikdnsksqvflkmnslqtddtaiyycakh yyyggsyamdywgqgtsvtvsstttpaprpptpaptiasqplslrpeacrpaaggavhtrgldfacdiyiwaplagtcgvlllsly itlyckrgrkkllyifkqpfmrpvqttqeedgcscrfpeeeeggcelrvkfsrsadapaykqgqnqlynelnlgrreeydvldkrr grdpemggkprrknpgeglynelqkdkmaeayseigmkgerrrgkghdglyqglstatkdtydalhmqalppr (SEQ ID NO: 891), or a sequence substantially identical thereto (e.g., at least 85%, 90% or 95% or higher identical thereto), with or without the signal peptide sequence indicated in capital letters.

[0685] In embodiment, the amino acid sequence is:
[0686] digmtqttsslsaslgdrvtiscrasqdiskylnwyqqkpdgtvklliyhtsrlhsgvpsrfsgsgsgtdysltisnlege diatyfcqqgntlpytfgggtkleitggggsggggsggggsevklgesgpglvapsqslsvtctvsgvslpdygvswirqpprkg lewlgviwgsettyynsalksrltiikdnsksqvflkmnslqtddtaiyycakhyyyggsyamdywgqgtsvtvsstttpaprp ptpaptiasqplslrpeacrpaaggavhtrgldfacdiyiwaplagtcgvlllslvitlyckrgrkkllyifkqpfmrpvqttqeedg cscrfpeeeeggcelrvkfsrsadapaykqggnqlynelnlgrreeydvldkrrgrdpemggkprrknpgeglynelqkdkm aeayseigmkgerrrgkghdglyqglstatkdtydalhmgalppr (SEQ ID NO: 892), or a sequence substantially homologous thereto (e.g., at least 85%, 90% or 95% or higher identical thereto).

[0687] In embodiments, the CAR molecule is a CD19 CAR molecule described herein, e.g., a humanized CAR molecule described herein, e.g., a humanized CD19 CAR molecule of Table 5 or having CDRs as set out in Tables 6A and 6B.

[0688] In embodiments, the CAR molecule is a CD19 CAR molecule described herein, e.g., a murine CAR molecule described herein, e.g., a murine CD19 CAR molecule of Table 5 or having CDRs as set out in Tables 6A and 6B.

[0689] In some embodiments, the CAR molecule comprises one, two, and/or three CDRs from the heavy chain variable region and/or one, two, and/or three CDRs from the light chain variable region of the murine or humanized CD19 CAR of Tables 6A and 6B.

[0690] In one embodiment, the antigen binding domain comprises one, two three (e.g., all three) heavy chain CDRs, HC CDR1, HC CDR2 and HC CDR3, from an antibody listed herein, and/or one, two, three (e.g., all three) light chain CDRs, LC CDR1, LC CDR2 and LC CDR3, from an antibody listed herein. In one embodiment, the antigen binding domain comprises a heavy chain variable region and/or a variable light chain region of an antibody listed or described herein.

[0691] Exemplary CD19 CARs include any of the CD19 CARs or anti-CD19 binding domains described herein, e.g., in one or more tables (e.g., Table 5) described herein (e.g., or an anti-CD19 CAR described in Xu et al. Blood 123.24(2014):3750-9; Kochenderfer et al. Blood 122.25(2013):4129-39, Cruz et al. Blood 122.17(2013):2965-73, NCT00586391, NCT01087294, NCT02456350, NCT00840853, NCT02659943, NCT02650999, NCT02640209, NCT01747486, NCT02546739, NCT02656147, NCT02772198, NCT00709033, NCT02081937, NCT00924326, NCT02735083, NCT02794246, NCT02746952, NCT01593696, NCT02134262, NCT01853631, NCT02443831, NCT02277522, NCT02348216, NCT02614066, NCT02030834, NCT02624258, NCT02625480, NCT02030847, NCT02644655, NCT02349698, NCT02813837, NCT02050347, NCT01683279, NCT02529813, NCT02537977, NCT02799550, NCT02672501, NCT02819583, NCT02028455, NCT01840566, NCT01318317, NCT01864889, NCT02706405, NCT01475058, NCT01430390, NCT02146924, NCT02051257, NCT02431988, NCT01815749, NCT02153580, NCT01865617, NCT02208362, NCT02685670, NCT02535364, NCT02631044, NCT02728882, NCT02735291, NCT01860937, NCT02822326, NCT02737085, NCT02465983, NCT02132624, NCT02782351, NCT01493453, NCT02652910, NCT02247609, NCT01029366, NCT01626495, NCT02721407, NCT01044069, NCT00422383, NCT01680991, NCT02794961, or NCT02456207, each of which is incorporated herein by reference in its entirety.

[0692] Exemplary CD19 CAR and antigen binding domain constructs that can be used in the methods described herein are shown in Table 5. The light and heavy chain CDR sequences according to Kabat are shown by the bold and underlined text, and are also summarized in Tables 5 and 6A-6B below. The location of the signal sequence and histidine tag are also underlined. In embodiments, the CD19 CAR sequences and antigen binding fragments thereof do not include the signal sequence and/or histidine tag sequences.

[0693] In embodiments, the CD19 CAR comprises an anti-CD19 binding domain (e.g., murine or humanized anti-CD19 binding domain), a transmembrane domain, and an intracellular signaling domain, and wherein said anti-CD19 binding domain comprises a heavy chain complementary determining region 1 (HC CDR1), a heavy chain complementary determining region 2 (HC CDR2), and a heavy chain complementary determining region 3 (HC CDR3) of any anti-CD19 heavy chain binding domain amino acid sequences listed in Table 5 and 6A-6B, or a sequence at least 85%, 90%, 95% or more identical thereto (e.g., having less than 5, 4, 3, 2 or 1 amino acid substitutions, e.g., conservative substitutions).

[0694] In one embodiment, the anti-CD19 binding domain comprises a light chain variable region described herein (e.g., in Table 5) and/or a heavy chain variable region described herein (e.g., in Table 5), or a sequence at least 85%, 90%, 95% or more identical thereto.

[0695] In one embodiment, the encoded anti-CD19 binding domain is a scFv comprising a light chain and a heavy chain of an amino acid sequence of Tables 5, or a sequence at least 85%, 90%, 95% or more identical thereto.

[0696] In an embodiment, the human or humanized anti-CD19 binding domain (e.g., an scFv) comprises: a light chain variable region comprising an amino acid sequence having at least one, two or three modifications (e.g., substitutions, e.g., conservative substitutions) but not more than 30, 20 or 10 modifications (e.g., substitutions, e.g., conservative substitutions) of an amino acid sequence of a light chain variable region provided in Table 5, or a sequence at least 85%, 90%, 95% or more identical thereto; and/or a heavy chain variable region comprising an amino acid sequence having at least one, two or three modifications (e.g., substitutions, e.g., conservative substitutions) but not more than 30, 20 or 10 modifications (e.g., substitutions, e.g., conservative substitutions) of an amino acid sequence of a heavy chain variable region provided in Table 5, or a sequence at least 85%, 90%, 95% or more identical thereto.

TABLE 5
CD19 CAR Constructs

| | | |
|---|---|---|
| | SEQ ID | |
| Name | NO: | Sequence |

CAR1

| | | |
|---|---|---|
| CAR1 scFv | 893 | EIVMTQSPATLSLSPGERATLSCRASQDISKYLNWYQQKPGQAPRLLIYH |
| domain | | TSRLHSGIPARFSGSGSGTDYTLTISSLQPEDFAVYFCQQGNTLPYTFGQ |
| | | GTKLEIKGGGGSGGGGSGGGGSQVQLQESGPGLVKPSETLSLTCTVSGVS |
| | | LPDYGVSWIRQPPGKGLEWIGVIWGSETTYYSSSLKSRVTISKDNSKNQV |
| | | SLKLSSVTAADTAVYYCAKHYYYGGSYAMDYWGQGTLVTVSS |
| 103101 | 894 | atggccctccctgtcaccgccctgctgcttccgctggctcttctgctccacgccg |
| CAR1 | | ctcggcccgaaattgtgatgacccagtcacccgccactcttagcctttcacccgg |
| Soluble | | tgagcgcgcaaccctgtcttgcagagcctcccaagacatctcaaaataccttaat |
| scFv-nt | | tggtatcaacagaagcccggacaggctcctcgccttctgatctaccacaccagcc |
| | | ggctccattctggaatccctgccaggttcagcggtagcggatctgggaccgacta |
| | | caccctcactatcagctcactgcagccagaggacttcgctgtctatttctgtcag |
| | | caagggaacaccctgccctacacctttggacagggcaccaagctcgagattaaag |
| | | gtggaggtggcagcggaggaggtgggtccggcggtggaggaagccaggtccaact |
| | | ccaagaaagcggaccgggtcttgtgaagccatcagaaactctttcactgacttgt |
| | | actgtgagcggagtgtctctccccgattacggggtgtcttggatcagacagccac |
| | | cggggaagggtctggaatggattggagtgatttggggctctgagactacttacta |
| | | ctcttcatccctcaagtcacgcgtcaccatctcaaaggacaactctaagaatcag |
| | | gtgtcactgaaactgtcatctgtgaccgcagccgacaccgccgtgtactattgcg |
| | | ctaagcattactattatggcgggagctacgcaatggattactggggacagggtac |
| | | tctggtcaccgtgtccagccaccaccatcatcaccatcaccat |
| 103101 | 895 | MALPVTALLLPLALLLHAARPeivmtqspatlslspgeratlscrasqdiskyln |
| CAR1 | | wyqqkpgqaprlliyhtsrlhsgiparfsgsgsgtdytltisslqpedfavyfcq |
| Soluble | | qgntlpytfgqgtkleikggggsggggsggggsqvqlqesgpglvkpsetlsltc |
| scFv-aa | | tvsgvslpdygvswirqppgkglewigviwgsettyyssslksrvtiskdnsknq |
| | | vslklssvtaadtavyycakhyyyggsyamdywgqgtlvtvsshhhhhhhh |
| 104875 | 896 | atggccctccctgtcaccgccctgctgcttccgctggctcttctgctccacgccg |
| CAR1- | | ctcggcccgaaattgtgatgacccagtcacccgccactcttagcctttcacccgg |
| Full-nt | | tgagcgcgcaaccctgtcttgcagagcctcccaagacatctcaaaataccttaat |
| | | tggtatcaacagaagcccggacaggctcctcgccttctgatctaccacaccagcc |
| | | ggctccattctggaatccctgccaggttcagcggtagcggatctgggaccgacta |
| | | caccctcactatcagctcactgcagccagaggacttcgctgtctatttctgtcag |
| | | caagggaacaccctgccctacacctttggacagggcaccaagctcgagattaaag |
| | | gtggaggtggcagcggaggaggtgggtccggcggtggaggaagccaggtccaact |
| | | ccaagaaagcggaccgggtcttgtgaagccatcagaaactctttcactgacttgt |
| | | actgtgagcggagtgtctctccccgattacggggtgtcttggatcagacagccac |
| | | cggggaagggtctggaatggattggagtgatttggggctctgagactacttacta |
| | | ctcttcatccctcaagtcacgcgtcaccatctcaaaggacaactctaagaatcag |
| | | gtgtcactgaaactgtcatctgtgaccgcagccgacaccgccgtgtactattgcg |
| | | ctaagcattactattatggcgggagctacgcaatggattactggggacagggtac |
| | | tctggtcaccgtgtccagcaccactaccccagcaccgaggccacccaccccggct |
| | | cctaccatcgcctcccagcctctgtccctgcgtccggaggcatgtagacccgcag |
| | | ctggtggggccgtgcatacccggggtcttgacttcgcctgcgatatctacatttg |
| | | ggcccctctggctggtacttgcggggtcctgctgctttcactcgtgatcactctt |
| | | tactgtaagcgcggtcggaagaagctgctgtacatctttaagcaacccttcatga |
| | | ggcctgtgcagactactcaagaggaggacggctgttcatgccggttcccagagga |
| | | ggaggaaggcggctgcgaactgcgcgtgaaattcagccgcagcgcagatgctcca |
| | | gcctacaagcaggggcagaaccagctctacaacgaactcaatcttggtcggagag |
| | | aggagtacgacgtgctggacaagcggagaggacgggacccagaaatgggcgggaa |
| | | gccgcgcagaaagaatccccaagagggcctgtacaacgagctccaaaaggataag |
| | | atggcagaagcctatagcgagattggtatgaaaggggaacgcagaagaggcaaag |
| | | gccacgacggactgtaccagggactcagcaccgccaccaaggacacctatgacgc |
| | | tcttcacatgcaggccctgccgcctcgg |
| 104875 | 897 | MALPVTALLLPLALLLHAARPeivmtqspatlslspgeratlscrasqdiskyln |
| CAR1- | | wyqqkpgqaprlliyhtsrlhsgiparfsgsgsgtdytltisslqpedfavyfcq |
| Full-aa | | qgntlpytfgqgtkleikggggsggggsggggsqvqlqesgpglvkpsetlsltc |
| | | tvsgvslpdygvswirqppgkglewigviwgsettyyssslksrvtiskdnsknq |
| | | vslklssvtaadtavyycakhyyyggsyamdywgqgtlvtvsstttpaprpptpa |
| | | ptiasqplslrpeacrpaaggavhtrgldfacdiyiwaplagtcgvlllslvitl |
| | | yckrgrkkllyifkqpfmrpvqttqeedgcscrfpeeeeggcelrvkfsrsadap |
| | | aykqgqnqlynelnlgrreeydvldkrrgrdpemggkprrknpqeglynelqkdk |
| | | [sequence omitted] |

CAR2

| | | |
|---|---|---|
| CAR2 scFv | 898 | eivmtqspatlslspgeratlscrasqdiskylnwyqqkpgqaprlliyhtsrlh |
| domain | | sgiparfsgsgsgtdytltisslqpedfavyfcqqgntlpytfgqgtkleikggg |
| | | gsggggsggggsqvqlqesgpglvkpsetlsltctvsgvslpdygvswirqppgk |
| | | glewigviwgsettyyqsslksrvtiskdnsknqvslklssvtaadtavyycakh |
| | | yyyggsyamdywgqgtlvtvss |
| 103102 | 899 | atggccctccctgtcaccgccctgctgcttccgctggctcttctgctccacgccg |
| CAR2- | | ctcggcccgaaattgtgatgacccagtcacccgccactcttagcctttcacccgg |
| Soluble | | tgagcgcgcaaccctgtcttgcagagcctcccaagacatctcaaaataccttaat |
| scFv-nt | | tggtatcaacagaagcccggacaggctcctcgccttctgatctaccacaccagcc |
| | | ggctccattctggaatccctgccaggttcagcggtagcggatctgggaccgacta |
| | | caccctcactatcagctcactgcagccagaggacttcgctgtctatttctgtcag |
| | | caagggaacaccctgccctacacctttggacagggcaccaagctcgagattaaag |
| | | gtggaggtggcagcggaggaggtgggtccggcggtggaggaagccaggtccaact |
| | | ccaagaaagcggaccgggtcttgtgaagccatcagaaactctttcactgacttgt |
| | | actgtgagcggagtgtctctccccgattacggggtgtcttggatcagacagccac |
| | | cggggaagggtctggaatggattggagtgatttggggctctgagactacttacta |
| | | ccaatcatccctcaagtcacgcgtcaccatctcaaaggacaactctaagaatcag |
| | | gtgtcactgaaactgtcatctgtgaccgcagccgacaccgccgtgtactattgcg |
| | | ctaagcattactattatggcgggagctacgcaatggattactggggacagggtac |
| | | tctggtcaccgtgtccagccaccaccatcatcaccatcaccat |
| 103102 | 900 | MALPVTALLLPLALLLHAARPeivmtqspatlslspgeratlscrasqdiskyln |
| CAR2- | | wyqqkpgqaprlliyhtsrlhsgiparfsgsgsgtdytltisslqpedfavyfcq |
| Soluble | | qgntlpytfgqgtkleikggggsggggsggggsqvqlqesgpglvkpsetlsltc |
| scFv-aa | | tvsgvslpdygvswirqppgkglewigviwgsettyyqsslksrvtiskdnsknq |
| | | vslklssvtaadtavyycakhyyyggsyamdywgqgtlvtvsshhhhhhhh |
| 104876 | 901 | atggccctccctgtcaccgccctgctgcttccgctggctcttctgctccacgccg |
| CAR2- | | ctcggcccgaaattgtgatgacccagtcacccgccactcttagcctttcacccgg |
| Full-nt | | tgagcgcgcaaccctgtcttgcagagcctcccaagacatctcaaaataccttaat |
| | | tggtatcaacagaagcccggacaggctcctcgccttctgatctaccacaccagcc |
| | | ggctccattctggaatccctgccaggttcagcggtagcggatctgggaccgacta |
| | | caccctcactatcagctcactgcagccagaggacttcgctgtctatttctgtcag |
| | | caagggaacaccctgccctacacctttggacagggcaccaagctcgagattaaag |
| | | gtggaggtggcagcggaggaggtgggtccggcggtggaggaagccaggtccaact |
| | | ccaagaaagcggaccgggtcttgtgaagccatcagaaactctttcactgacttgt |
| | | actgtgagcggagtgtctctccccgattacggggtgtcttggatcagacagccac |
| | | cggggaagggtctggaatggattggagtgatttggggctctgagactacttacta |
| | | ccaatcatccctcaagtcacgcgtcaccatctcaaaggacaactctaagaatcag |
| | | gtgtcactgaaactgtcatctgtgaccgcagccgacaccgccgtgtactattgcg |
| | | ctaagcattactattatggcgggagctacgcaatggattactggggacagggtac |
| | | tctggtcaccgtgtccagcaccactaccccagcaccgaggccacccaccccggct |
| | | cctaccatcgcctcccagcctctgtccctgcgtccggaggcatgtagacccgcag |
| | | ctggtggggccgtgcatacccggggtcttgacttcgcctgcgatatctacatttg |
| | | ggcccctctggctggtacttgcggggtcctgctgctttcactcgtgatcactctt |
| | | tactgtaagcgcggtcggaagaagctgctgtacatctttaagcaacccttcatga |
| | | ggcctgtgcagactactcaagaggaggacggctgttcatgccggttcccagagga |
| | | ggaggaaggcggctgcgaactgcgcgtgaaattcagccgcagcgcagatgctcca |
| | | gcctacaagcaggggcagaaccagctctacaacgaactcaatcttggtcggagag |
| | | aggagtacgacgtgctggacaagcggagaggacgggacccagaaatgggcgggaa |
| | | gccgcgcagaaagaatccccaagagggcctgtacaacgagctccaaaaggataag |
| | | atggcagaagcctatagcgagattggtatgaaaggggaacgcagaagaggcaaag |
| | | gccacgacggactgtaccagggactcagcaccgccaccaaggacacctatgacgc |
| | | tcttcacatgcaggccctgccgcctcgg |
| 104876 | 902 | MALPVTALLLPLALLLHAARPeivmtqspatlslspgeratlscrasqdiskyln |
| CAR2- | | wyqqkpgqaprlliyhtsrlhsgiparfsgsgsgtdytltisslqpedfavyfcq |
| Full-aa | | qgntlpytfgqgtkleikggggsggggsggggsqvqlqesgpglvkpsetlsltc |
| | | tvsgvslpdygvswirqppgkglewigviwgsettyyqsslksrvtiskdnsknq |
| | | vslklssvtaadtavyycakhyyyggsyamdywgqgtlvtvsstttpaprpptpa |
| | | ptiasqplslrpeacrpaaggavhtrgldfacdiyiwaplagtcgvlllslvitl |
| | | yckrgrkkllyifkqpfmrpvqttqeedgcscrfpeeeeggcelrvkfsrsadap |
| | | aykqgqnqlynelnlgrreeydvldkrrgrdpemggkprrknpqeglynelqkdk |
| | | [sequence omitted] |

CAR3

| | | |
|---|---|---|
| CAR3 scFv | 903 | qvqlqesgpglvkpsetlsltctvsgvslpdygvswirqppgkglewigviwgse |
| domain | | ttyyssslksrvtiskdnsknqvslklssvtaadtavyycakhyyyggsyamdyw |
| | | gqgtlvtvssggggsggggsggggseivmtqspatlslspgeratlscrasqdis |
| | | kylnwyqqkpgqaprlliyhtsrlhsgiparfsgsgsgtdytltisslqpedfav |
| | | yfcqqgntlpytfgqgtkleik |
| 103104 | 904 | atggctctgcccgtgaccgcactcctcctgccactggctctgctgcttcacgccg |
| CAR3- | | ctcgcccacaagtccagcttcaagaatcagggcctggtctggtgaagccatctga |
| Soluble | | gactctgtccctcacttgcaccgtgagcggagtgtccctcccagactacggagtg |
| scFv-nt | | agctggattagacagcctcccggaaagggactggagtggatcggagtgatttggg |
| | | gtagcgaaaccacttactattcatcttccctgaagtcacgggtcaccatttcaaa |
| | | ggataactcaaagaatcaagtgagcctcaagctctcatcagtcaccgccgctgac |
| | | accgccgtgtattactgtgccaagcattactactatggagggtcctacgccatgg |
| | | actactggggccagggaactctggtcactgtgtcatctggtggaggaggtagcgg |
| | | aggaggcgggagcggtggaggtggctccgaaatcgtgatgacccagagccctgca |
| | | accctgtccctttctcccggggaacgggctaccctttcttgtcgggcatcacaag |
| | | atatctcaaaatacctcaattggtatcaacagaagccgggacaggcccctaggct |
| | | tcttatctaccacacctctcgcctgcatagcgggattcccgcacgctttagcggg |
| | | tctggaagcgggaccgactacactctgaccatctcatctctccagcccgaggact |
| | | tcgccgtctacttctgccagcagggtaacaccctgccgtacaccttcggccaggg |
| | | caccaagcttgagatcaaacatcaccaccatcatcaccatcac |
| 103104 | 905 | MALPVTALLLPLALLLHAARPqvqlqesgpglvkpsetlsltctvsgvslpdygv |
| CAR3- | | swirqppgkglewigviwgsettyyssslksrvtiskdnsknqvslklssvtaad |
| Soluble | | tavyycakhyyyggsyamdywgqgtlvtvssggggsggggsggggseivmtqspa |
| scFv-aa | | tlslspgeratlscrasqdiskylnwyqqkpgqaprlliyhtsrlhsgiparfsg |
| | | sgsgtdytltisslqpedfavyfcqqgntlpytfgqgtkleikhhhhhhhh |
| 104877 | 906 | atggctctgcccgtgaccgcactcctcctgccactggctctgctgcttcacgccg |
| CAR3- | | ctcgcccacaagtccagcttcaagaatcagggcctggtctggtgaagccatctga |
| Full-nt | | gactctgtccctcacttgcaccgtgagcggagtgtccctcccagactacggagtg |
| | | agctggattagacagcctcccggaaagggactggagtggatcggagtgatttggg |
| | | gtagcgaaaccacttactattcatcttccctgaagtcacgggtcaccatttcaaa |
| | | ggataactcaaagaatcaagtgagcctcaagctctcatcagtcaccgccgctgac |
| | | accgccgtgtattactgtgccaagcattactactatggagggtcctacgccatgg |
| | | actactggggccagggaactctggtcactgtgtcatctggtggaggaggtagcgg |
| | | aggaggcgggagcggtggaggtggctccgaaatcgtgatgacccagagccctgca |
| | | accctgtccctttctcccggggaacgggctaccctttcttgtcgggcatcacaag |
| | | atatctcaaaatacctcaattggtatcaacagaagccgggacaggcccctaggct |
| | | tcttatctaccacacctctcgcctgcatagcgggattcccgcacgctttagcggg |
| | | tctggaagcgggaccgactacactctgaccatctcatctctccagcccgaggact |
| | | tcgccgtctacttctgccagcagggtaacaccctgccgtacaccttcggccaggg |
| | | caccaagcttgagatcaaaaccactactcccgctccaaggccacccacccctgcc |
| | | ccgaccatcgcctctcagccgctttccctgcgtccggaggcatgtagacccgcag |
| | | ctggtggggccgtgcatacccggggtcttgacttcgcctgcgatatctacatttg |
| | | ggcccctctggctggtacttgcggggtcctgctgctttcactcgtgatcactctt |
| | | tactgtaagcgcggtcggaagaagctgctgtacatctttaagcaacccttcatga |
| | | ggcctgtgcagactactcaagaggaggacggctgttcatgccggttcccagagga |
| | | ggaggaaggcggctgcgaactgcgcgtgaaattcagccgcagcgcagatgctcca |
| | | gcctacaagcaggggcagaaccagctctacaacgaactcaatcttggtcggagag |
| | | aggagtacgacgtgctggacaagcggagaggacgggacccagaaatgggcgggaa |
| | | gccgcgcagaaagaatccccaagagggcctgtacaacgagctccaaaaggataag |
| | | atggcagaagcctatagcgagattggtatgaaaggggaacgcagaagaggcaaag |
| | | gccacgacggactgtaccagggactcagcaccgccaccaaggacacctatgacgc |
| | | tcttcacatgcaggccctgccgcctcgg |
| 104877 | 907 | MALPVTALLLPLALLLHAARPqvqlqesgpglvkpsetlsltctvsgvslpdygv |
| CAR3- | | swirqppgkglewigviwgsettyyssslksrvtiskdnsknqvslklssvtaad |
| Full-aa | | tavyycakhyyyggsyamdywgqgtlvtvssggggsggggsggggseivmtqspa |
| | | tlslspgeratlscrasqdiskylnwyqqkpgqaprlliyhtsrlhsgiparfsg |
| | | sgsgtdytltisslqpedfavyfcqqgntlpytfgqgtkleiktttpaprpptpa |
| | | ptiasqplslrpeacrpaaggavhtrgldfacdiyiwaplagtcgvlllslvitl |
| | | yckrgrkkllyifkqpfmrpvqttqeedgcscrfpeeeeggcelrvkfsrsadap |
| | | aykqgqnqlynelnlgrreeydvldkrrgrdpemggkprrknpqeglynelqkdk |
| | | [sequence omitted] |

CAR4

| | | |
|---|---|---|
| CAR4 scFv | 908 | qvqlqesgpglvkpsetlsltctvsgvslpdygvswirqppgkglewigviwgse |
| domain | | ttyyqsslksrvtiskdnsknqvslklssvtaadtavyycakhyyyggsyamdyw |
| | | gqgtlvtvssggggsggggsggggseivmtqspatlslspgeratlscrasqdis |
| | | kylnwyqqkpgqaprlliyhtsrlhsgiparfsgsgsgtdytltisslqpedfav |
| | | yfcqqgntlpytfgqgtkleik |
| 103106 | 909 | atggctctgcccgtgaccgcactcctcctgccactggctctgctgcttcacgccg |
| CAR4- | | ctcgcccacaagtccagcttcaagaatcagggcctggtctggtgaagccatctga |
| Soluble | | gactctgtccctcacttgcaccgtgagcggagtgtccctcccagactacggagtg |
| scFv-nt | | agctggattagacagcctcccggaaagggactggagtggatcggagtgatttggg |
| | | gtagcgaaaccacttactatcaatcttccctgaagtcacgggtcaccatttcaaa |
| | | ggataactcaaagaatcaagtgagcctcaagctctcatcagtcaccgccgctgac |
| | | accgccgtgtattactgtgccaagcattactactatggagggtcctacgccatgg |
| | | actactggggccagggaactctggtcactgtgtcatctggtggaggaggtagcgg |
| | | aggaggcgggagcggtggaggtggctccgaaatcgtgatgacccagagccctgca |
| | | accctgtccctttctcccggggaacgggctaccctttcttgtcgggcatcacaag |
| | | atatctcaaaatacctcaattggtatcaacagaagccgggacaggcccctaggct |
| | | tcttatctaccacacctctcgcctgcatagcgggattcccgcacgctttagcggg |
| | | tctggaagcgggaccgactacactctgaccatctcatctctccagcccgaggact |
| | | tcgccgtctacttctgccagcagggtaacaccctgccgtacaccttcggccaggg |
| | | caccaagcttgagatcaaacatcaccaccatcatcaccatcac |
| 103106 | 910 | MALPVTALLLPLALLLHAARPqvqlqesgpglvkpsetlsltctvsgvslpdygv |
| CAR4- | | swirqppgkglewigviwgsettyyqsslksrvtiskdnsknqvslklssvtaad |
| Soluble | | tavyycakhyyyggsyamdywgqgtlvtvssggggsggggsggggseivmtqspa |
| scFv-aa | | tlslspgeratlscrasqdiskylnwyqqkpgqaprlliyhtsrlhsgiparfsg |
| | | sgsgtdytltisslqpedfavyfcqqgntlpytfgqgtkleikhhhhhhhh |
| 104878 | 911 | atggctctgcccgtgaccgcactcctcctgccactggctctgctgcttcacgccg |
| CAR4- | | ctcgcccacaagtccagcttcaagaatcagggcctggtctggtgaagccatctga |
| Full-nt | | gactctgtccctcacttgcaccgtgagcggagtgtccctcccagactacggagtg |
| | | agctggattagacagcctcccggaaagggactggagtggatcggagtgatttggg |
| | | gtagcgaaaccacttactatcaatcttccctgaagtcacgggtcaccatttcaaa |
| | | ggataactcaaagaatcaagtgagcctcaagctctcatcagtcaccgccgctgac |
| | | accgccgtgtattactgtgccaagcattactactatggagggtcctacgccatgg |
| | | actactggggccagggaactctggtcactgtgtcatctggtggaggaggtagcgg |
| | | aggaggcgggagcggtggaggtggctccgaaatcgtgatgacccagagccctgca |
| | | accctgtccctttctcccggggaacgggctaccctttcttgtcgggcatcacaag |
| | | atatctcaaaatacctcaattggtatcaacagaagccgggacaggcccctaggct |
| | | tcttatctaccacacctctcgcctgcatagcgggattcccgcacgctttagcggg |
| | | tctggaagcgggaccgactacactctgaccatctcatctctccagcccgaggact |
| | | tcgccgtctacttctgccagcagggtaacaccctgccgtacaccttcggccaggg |
| | | caccaagcttgagatcaaaaccactactcccgctccaaggccacccacccctgcc |
| | | ccgaccatcgcctctcagccgctttccctgcgtccggaggcatgtagacccgcag |
| | | ctggtggggccgtgcatacccggggtcttgacttcgcctgcgatatctacatttg |
| | | ggcccctctggctggtacttgcggggtcctgctgctttcactcgtgatcactctt |
| | | tactgtaagcgcggtcggaagaagctgctgtacatctttaagcaacccttcatga |
| | | ggcctgtgcagactactcaagaggaggacggctgttcatgccggttcccagagga |
| | | ggaggaaggcggctgcgaactgcgcgtgaaattcagccgcagcgcagatgctcca |
| | | gcctacaagcaggggcagaaccagctctacaacgaactcaatcttggtcggagag |
| | | aggagtacgacgtgctggacaagcggagaggacgggacccagaaatgggcgggaa |
| | | gccgcgcagaaagaatccccaagagggcctgtacaacgagctccaaaaggataag |
| | | atggcagaagcctatagcgagattggtatgaaaggggaacgcagaagaggcaaag |
| | | gccacgacggactgtaccagggactcagcaccgccaccaaggacacctatgacgc |
| | | tcttcacatgcaggccctgccgcctcgg |
| 104878 | 912 | MALPVTALLLPLALLLHAARPqvqlqesgpglvkpsetlsltctvsgvslpdygv |
| CAR4- | | swirqppgkglewigviwgsettyyqsslksrvtiskdnsknqvslklssvtaad |
| Full-aa | | tavyycakhyyyggsyamdywgqgtlvtvssggggsggggsggggseivmtqspa |
| | | tlslspgeratlscrasqdiskylnwyqqkpgqaprlliyhtsrlhsgiparfsg |
| | | sgsgtdytltisslqpedfavyfcqqgntlpytfgqgtkleiktttpaprpptpa |
| | | ptiasqplslrpeacrpaaggavhtrgldfacdiyiwaplagtcgvlllslvitl |
| | | yckrgrkkllyifkqpfmrpvqttqeedgcscrfpeeeeggcelrvkfsrsadap |
| | | aykqgqnqlynelnlgrreeydvldkrrgrdpemggkprrknpqeglynelqkdk |
| | | [sequence omitted] |

CAR5

| | | |
|---|---|---|
| CAR5 scFv | 913 | eivmtqspatlslspgeratlscrasqdiskylnwyqqkpgqaprlliyhtsrlh |
| domain | | sgiparfsgsgsgtdytltisslqpedfavyfcqqgntlpytfgqgtkleikggg |
| | | gsggggsggggsggggsqvqlqesgpglvkpsetlsltctvsgvslpdygvswir |
| | | qppgkglewigviwgsettyyssslksrvtiskdnsknqvslklssvtaadtavy |
| | | ycakhyyyggsyamdywgqgtlvtvss |
| 99789 | 914 | atggccctcccagtgaccgctctgctgctgcctctcgcacttcttctccatgccg |
| CAR5- | | ctcggcctgagatcgtcatgacccaaagccccgctaccctgtccctgtcacccgg |
| Soluble | | cgagagggcaaccctttcatgcagggccagccaggacatttctaagtacctcaac |
| scFv-nt | | tggtatcagcagaagccagggcaggctcctcgcctgctgatctaccacaccagcc |
| | | gcctccacagcggtatccccgccagattttccgggagcgggtctggaaccgacta |
| | | caccctcaccatctcttctctgcagcccgaggatttcgccgtctatttctgccag |
| | | caggggaatactctgccgtacaccttcggtcaaggtaccaagctggaaatcaagg |
| | | gaggcggaggatcaggcggtggcggaagcggaggaggtggctccggaggaggagg |
| | | ttcccaagtgcagcttcaagaatcaggacccggacttgtgaagccatcagaaacc |
| | | ctctccctgacttgtaccgtgtccggtgtgagcctccccgactacggagtctctt |
| | | ggattcgccagcctccggggaagggtcttgaatggattggggtgatttggggatc |
| | | agagactacttactactcttcatcacttaagtcacgggtcaccatcagcaaagat |
| | | aatagcaagaaccaagtgtcacttaagctgtcatctgtgaccgccgctgacaccg |
| | | ccgtgtactattgtgccaaacattactattacggagggtcttatgctatggacta |
| | | ctggggacaggggaccctggtgactgtctctagccatcaccatcaccaccatcat |
| | | cac |
| 99789 | 915 | MALPVTALLLPLALLLHAARPeivmtqspatlslspgeratlscrasqdiskyln |
| CAR5- | | wyqqkpgqaprlliyhtsrlhsgiparfsgsgsgtdytltisslqpedfavyfcq |
| Soluble | | qgntlpytfgqgtkleikggggggggsggggsggggsqvqlqesgpglvkpset |
| scFv-aa | | lsltctvsgvslpdygvswirqppgkglewigviwgsettyyssslksrvtiskd |
| | | nsknqvslklssvtaadtavyycakhyyyggsyamdywgqgtlvtvsshhhhhhh |
| | | h |
| 104879 | 916 | atggccctccctgtcaccgccctgctgcttccgctggctcttctgctccacgccg |
| CAR5- | | ctcggcccgaaattgtgatgacccagtcacccgccactcttagcctttcacccgg |
| Full-nt | | tgagcgcgcaaccctgtcttgcagagcctcccaagacatctcaaaataccttaat |
| | | tggtatcaacagaagcccggacaggctcctcgccttctgatctaccacaccagcc |
| | | ggctccattctggaatccctgccaggttcagcggtagcggatctgggaccgacta |
| | | caccctcactatcagctcactgcagccagaggacttcgctgtctatttctgtcag |
| | | caagggaacaccctgccctacacctttggacagggcaccaagctcgagattaaag |
| | | gtggaggtggcagcggaggaggtgggtccggcggtggaggaagcggcggaggcgg |
| | | gagccaggtccaactccaagaaagcggaccgggtcttgtgaagccatcagaaact |
| | | ctttcactgacttgtactgtgagcggagtgtctctccccgattacggggtgtctt |
| | | ggatcagacagccaccggggaagggtctggaatggattggagtgatttggggctc |
| | | tgagactacttactactcttcatccctcaagtcacgcgtcaccatctcaaaggac |
| | | aactctaagaatcaggtgtcactgaaactgtcatctgtgaccgcagccgacaccg |
| | | ccgtgtactattgcgctaagcattactattatggcgggagctacgcaatggatta |
| | | ctggggacagggtactctggtcaccgtgtccagcaccactaccccagcaccgagg |
| | | ccacccaccccggctcctaccatcgcctcccagcctctgtccctgcgtccggagg |
| | | catgtagacccgcagctggtggggccgtgcatacccggggtcttgacttcgcctg |
| | | cgatatctacatttgggcccctctggctggtacttgcggggtcctgctgctttca |
| | | ctcgtgatcactctttactgtaagcgcggtcggaagaagctgctgtacatcttta |
| | | agcaacccttcatgaggcctgtgcagactactcaagaggaggacggctgttcatg |
| | | ccggttcccagaggaggaggaaggcggctgcgaactgcgcgtgaaattcagccgc |
| | | agcgcagatgctccagcctacaagcaggggcagaaccagctctacaacgaactca |
| | | atcttggtcggagagaggagtacgacgtgctggacaagcggagaggacgggaccc |
| | | agaaatgggcgggaagccgcgcagaaagaatccccaagagggcctgtacaacgag |
| | | ctccaaaaggataagatggcagaagcctatagcgagattggtatgaaaggggaac |
| | | gcagaagaggcaaaggccacgacggactgtaccagggactcagcaccgccaccaa |
| | | ggacacctatgacgctcttcacatgcaggccctgccgcctcgg |
| 104879 | 917 | MALPVTALLLPLALLLHAARPeivmtqspatlslspgeratlscrasqdiskyln |
| CAR5- | | wyqqkpgqaprlliyhtsrlhsgiparfsgsgsgtdytltisslqpedfavyfcq |
| Full-aa | | qgntlpytfgqgtkleikggggsggggsggggsggggsqvqlqesgpglvkpset |
| | | lsltctvsgvslpdygvswirqppgkglewigviwgsettyyssslksrvtiskd |
| | | nsknqvslklssvtaadtavyycakhyyyggsyamdywgqgtlvtvsstttpapr |
| | | pptpaptiasqplslrpeacrpaaggavhtrgldfacdiyiwaplagtcgvllls |
| | | lvitlyckrgrkkllyifkqpfmrpvqttqeedgcscrfpeeeeggcelrvkfsr |
| | | sadapaykqgqnqlynelnlgrreeydvldkrrgrdpemggkprrknpqeglyne |
| | | lqkdkmaeayseigmkgerrrgkghdglyqglstatkdtydalhmqalppr |

CAR6

| | | |
|---|---|---|
| CAR6 | 918 | eivmtqspatlslspgeratlscrasqdiskylnwyqqkpgqaprlliyhtsrlh |
| scFv | | sgiparfsgsgsgtdytltisslqpedfavyfcqqgntlpytfgqgtkleikggg |
| domain | | gsggggsggggsggggsqvqlqesgpglvkpsetlsltctvsgvslpdygvswir |
| | | qppgkglewigviwgsettyyqsslksrvtiskdnsknqvslklssvtaadtavy |
| | | ycakhyyyggsyamdywgqgtlvtvss |
| 99790 | 919 | atggccctcccagtgaccgctctgctgctgcctctcgcacttcttctccatgccg |
| CAR6- | | ctcggcctgagatcgtcatgacccaaagccccgctaccctgtccctgtcacccgg |
| Soluble | | cgagagggcaaccctttcatgcagggccagccaggacatttctaagtacctcaac |
| scFv-nt | | tggtatcagcagaagccagggcaggctcctcgcctgctgatctaccacaccagcc |
| | | gcctccacagcggtatccccgccagattttccgggagcgggtctggaaccgacta |
| | | caccctcaccatctcttctctgcagcccgaggatttcgccgtctatttctgccag |
| | | caggggaatactctgccgtacaccttcggtcaaggtaccaagctggaaatcaagg |
| | | gaggcggaggatcaggcggtggcggaagcggaggaggtggctccggaggaggagg |
| | | ttcccaagtgcagcttcaagaatcaggacccggacttgtgaagccatcagaaacc |
| | | ctctccctgacttgtaccgtgtccggtgtgagcctccccgactacggagtctctt |
| | | ggattcgccagcctccggggaagggtcttgaatggattggggtgatttggggatc |
| | | agagactacttactaccagtcatcacttaagtcacgggtcaccatcagcaaagat |
| | | aatagcaagaaccaagtgtcacttaagctgtcatctgtgaccgccgctgacaccg |
| | | ccgtgtactattgtgccaaacattactattacggagggtcttatgctatggacta |
| | | ctggggacaggggaccctggtgactgtctctagccatcaccatcaccaccatcat |
| | | cac |
| 99790 | 920 | MALPVTALLLPLALLLHAARPeivmtqspatlslspgeratlscrasqdiskyln |
| CAR6- | | wyqqkpgqaprlliyhtsrlhsgiparfsgsgsgtdytltisslqpedfavyfcq |
| Soluble | | qgntlpytfgqgtkleikggggsggggsggggsggggsqvqlqesgpglvkpset |
| scFv-aa | | lsltctvsgvslpdygvswirqppgkglewigviwgsettyyqsslksrvtiskd |
| | | nsknqvslklssvtaadtavyycakhyyyggsyamdywgqgtlvtvsshhhhhhh |
| | | h |
| 104880 | 921 | atggccctccctgtcaccgccctgctgcttccgctggctcttctgctccacgccg |
| CAR6- | | ctcggcccgaaattgtgatgacccagtcacccgccactcttagcctttcacccgg |
| Full-nt | | tgagcgcgcaaccctgtcttgcagagcctcccaagacatctcaaaataccttaat |
| | | tggtatcaacagaagcccggacaggctcctcgccttctgatctaccacaccagcc |
| | | ggctccattctggaatccctgccaggttcagcggtagcggatctgggaccgacta |
| | | caccctcactatcagctcactgcagccagaggacttcgctgtctatttctgtcag |
| | | caagggaacaccctgccctacacctttggacagggcaccaagctcgagattaaag |
| | | gtggaggtggcagcggaggaggtgggtccggcggtggaggaagcggaggcggagg |
| | | gagccaggtccaactccaagaaagcggaccgggtcttgtgaagccatcagaaact |
| | | ctttcactgacttgtactgtgagcggagtgtctctccccgattacggggtgtctt |
| | | ggatcagacagccaccggggaagggtctggaatggattggagtgatttggggctc |
| | | tgagactacttactaccaatcatccctcaagtcacgcgtcaccatctcaaaggac |
| | | aactctaagaatcaggtgtcactgaaactgtcatctgtgaccgcagccgacaccg |
| | | ccgtgtactattgcgctaagcattactattatggcgggagctacgcaatggatta |
| | | ctggggacagggtactctggtcaccgtgtccagcaccactaccccagcaccgagg |
| | | ccacccaccccggctcctaccatcgcctcccagcctctgtccctgcgtccggagg |
| | | catgtagacccgcagctggtggggccgtgcatacccggggtcttgacttcgcctg |
| | | cgatatctacatttgggcccctctggctggtacttgcggggtcctgctgctttca |
| | | ctcgtgatcactctttactgtaagcgcggtcggaagaagctgctgtacatcttta |
| | | agcaacccttcatgaggcctgtgcagactactcaagaggaggacggctgttcatg |
| | | ccggttcccagaggaggaggaaggcggctgcgaactgcgcgtgaaattcagccgc |
| | | agcgcagatgctccagcctacaagcaggggcagaaccagctctacaacgaactca |
| | | atcttggtcggagagaggagtacgacgtgctggacaagcggagaggacgggaccc |
| | | agaaatgggcgggaagccgcgcagaaagaatccccaagagggcctgtacaacgag |
| | | ctccaaaaggataagatggcagaagcctatagcgagattggtatgaaaggggaac |
| | | gcagaagaggcaaaggccacgacggactgtaccagggactcagcaccgccaccaa |
| | | ggacacctatgacgctcttcacatgcaggccctgccgcctcgg |
| 104880 | 922 | MALPVTALLLPLALLLHAARPeivmtqspatlslspgeratlscrasqdiskyln |
| CAR6- | | wyqqkpgqaprlliyhtsrlhsgiparfsgsgsgtdytltisslqpedfavyfcq |
| Full-aa | | qgntlpytfgqgtkleikggggsggggsggggsggggsqvqlqesgpglvkpset |
| | | lsltctvsgvslpdygvswirqppgkglewigviwgsettyyqsslksrvtiskd |
| | | nsknqvslklssvtaadtavyycakhyyyggsyamdywgqgtlvtvsstttpapr |
| | | pptpaptiasqplslrpeacrpaaggavhtrgldfacdiyiwaplagtcgvllls |
| | | lvitlyckrgrkkllyifkqpfmrpvqttqeedgcscrfpeeeeggcelrvkfsr |
| | | sadapaykqgqnqlynelnlgrreeydvldkrrgrdpemggkprrknpqeglyne |
| | | lqkdkmaeayseigmkgerrrgkghdglyqglstatkdtydalhmqalppr |

CAR7

| | | |
|---|---|---|
| CAR7 scFv | 923 | qvqlqesgpglvkpsetlsltctvsgvslpdygvswirqppgkglewigviwgse |
| domain | | ttyyssslksrvtiskdnsknqvslklssvtaadtavyycakhyyyggsyamdyw |
| | | gqgtlvtvssggggsggggsggggsggggseivmtqspatlslspgeratlscra |
| | | sqdiskylnwyqqkpgqaprlliyhtsrlhsgiparfsgsgsgtdytltisslqp |
| | | edfavyfcqqgntlpytfgqgtkleik |
| 100796 | 924 | atggcactgcctgtcactgccctcctgctgcctctggccctccttctgcatgccg |
| CAR7- | | ccaggccccaagtccagctgcaagagtcaggacccggactggtgaagccgtctga |
| Soluble | | gactctctcactgacttgtaccgtcagcggcgtgtccctccccgactacggagtg |
| scFv-nt | | tcatggatccgccaacctcccgggaaagggcttgaatggattggtgtcatctggg |
| | | gttctgaaaccacctactactcatcttccctgaagtccagggtgaccatcagcaa |
| | | ggataattccaagaaccaggtcagccttaagctgtcatctgtgaccgctgctgac |
| | | accgccgtgtattactgcgccaagcactactattacggaggaagctacgctatgg |
| | | actattggggacagggcactctcgtgactgtgagcagcggcggtggagggtctgg |
| | | aggtggaggatccggtggtggtgggtcaggcggaggagggagcgagattgtgatg |
| | | actcagtcaccagccaccctttctctttcacccggcgagagagcaaccctgagct |
| | | gtagagccagccaggacatttctaagtacctcaactggtatcagcaaaaaccggg |
| | | gcaggcccctcgcctcctgatctaccatacctcacgccttcactctggtatcccc |
| | | gctcggtttagcggatcaggatctggtaccgactacactctgaccatttccagcc |
| | | tgcagccagaagatttcgcagtgtatttctgccagcagggcaatacccttcctta |
| | | caccttcggtcagggaaccaagctcgaaatcaagcaccatcaccatcatcaccac |
| | | cat |
| 100796 | 925 | MALPVTALLLPLALLLHAARPqvqlqesgpglvkpsetlsltctvsgvslpdygv |
| CAR7- | | swirqppgkglewigviwgsettyyssslksrvtiskdnsknqvslklssvtaad |
| Soluble | | tavyycakhyyyggsyamdywgqgtlvtvssggggsggggsggggsggggseivm |
| scFv-aa | | tqspatlslspgeratlscrasqdiskylnwyqqkpgqaprlliyhtsrlhsgip |
| | | arfsgsgsgtdytltisslqpedfavyfcqqgntlpytfgqgtkleikhhhhhhh |
| | | h |
| 104881 | 926 | atggctctgcccgtgaccgcactcctcctgccactggctctgctgcttcacgccg |
| CAR7 | | ctcgcccacaagtccagcttcaagaatcagggcctggtctggtgaagccatctga |
| Full-nt | | gactctgtccctcacttgcaccgtgagcggagtgtccctcccagactacggagtg |
| | | agctggattagacagcctcccggaaagggactggagtggatcggagtgatttggg |
| | | gtagcgaaaccacttactattcatcttccctgaagtcacgggtcaccatttcaaa |
| | | ggataactcaaagaatcaagtgagcctcaagctctcatcagtcaccgccgctgac |
| | | accgccgtgtattactgtgccaagcattactactatggagggtcctacgccatgg |
| | | actactggggccagggaactctggtcactgtgtcatctggtggaggaggtagcgg |
| | | aggaggcgggagcggtggaggtggctccggaggtggcggaagcgaaatcgtgatg |
| | | acccagagccctgcaaccctgtccctttctcccggggaacgggctaccctttctt |
| | | gtcgggcatcacaagatatctcaaaatacctcaattggtatcaacagaagccggg |
| | | acaggcccctaggcttcttatctaccacacctctcgcctgcatagcgggattccc |
| | | gcacgctttagcgggtctggaagcgggaccgactacactctgaccatctcatctc |
| | | tccagcccgaggacttcgccgtctacttctgccagcagggtaacaccctgccgta |
| | | caccttcggccagggcaccaagcttgagatcaaaaccactactcccgctccaagg |
| | | ccacccacccctgccccgaccatcgcctctcagccgctttccctgcgtccggagg |
| | | catgtagacccgcagctggtggggccgtgcatacccggggtcttgacttcgcctg |
| | | cgatatctacatttgggcccctctggctggtacttgcggggtcctgctgctttca |
| | | ctcgtgatcactctttactgtaagcgcggtcggaagaagctgctgtacatcttta |
| | | agcaacccttcatgaggcctgtgcagactactcaagaggaggacggctgttcatg |
| | | ccggttcccagaggaggaggaaggcggctgcgaactgcgcgtgaaattcagccgc |
| | | agcgcagatgctccagcctacaagcaggggcagaaccagctctacaacgaactca |
| | | atcttggtcggagagaggagtacgacgtgctggacaagcggagaggacgggaccc |
| | | agaaatgggcgggaagccgcgcagaaagaatccccaagagggcctgtacaacgag |
| | | ctccaaaaggataagatggcagaagcctatagcgagattggtatgaaaggggaac |
| | | gcagaagaggcaaaggccacgacggactgtaccagggactcagcaccgccaccaa |
| | | ggacacctatgacgctcttcacatgcaggccctgccgcctcgg |
| 104881 | 927 | MALPVTALLLPLALLLHAARPqvqlqesgpglvkpsetlsltctvsgvslpdygv |
| CAR7 | | swirqppgkglewigviwgsettyyssslksrvtiskdnsknqvslklssvtaad |
| Full-aa | | tavyycakhyyyggsyamdywgqgtlvtvssggggsggggsggggsggggseivm |
| | | tqspatlslspgeratlscrasqdiskylnwyqqkpgqaprlliyhtsrlhsgip |
| | | arfsgsgsgtdytltisslqpedfavyfcgggntlpytfgqgtkleiktttpapr |
| | | pptpaptiasqplslrpeacrpaaggavhtrgldfacdiyiwaplagtcgvllls |
| | | lvitlyckrgrkkllyifkqpfmrpvqttqeedgcscrfpeeeeggcelrvkfsr |
| | | sadapaykqgqnqlynelnlgrreeydvldkrrgrdpemggkprrknpqeglyne |
| | | lqkdkmaeayseigmkgerrrgkghdglyqglstatkdtydalhmqalppr |

CAR8

| | | |
|---|---|---|
| CAR8 scFv | 928 | qvqlqesgpglvkpsetlsltctvsgvslpdygvswirqppgkglewigviwgse |
| domain | | ttyyqsslksrvtiskdnsknqvslklssvtaadtavyycakhyyyggsyamdyw |
| | | gqgtlvtvssggggsggggsggggsggggseivmtqspatlslspgeratlscra |
| | | sqdiskylnwyqqkpgqaprlliyhtsrlhsgiparfsgsgsgtdytltisslqp |
| | | edfavyfcqqgntlpytfgqgtkleik |
| 100798 | 929 | atggcactgcctgtcactgccctcctgctgcctctggccctccttctgcatgccg |
| CAR8- | | ccaggccccaagtccagctgcaagagtcaggacccggactggtgaagccgtctga |
| Soluble | | gactctctcactgacttgtaccgtcagcggcgtgtccctccccgactacggagtg |
| scFv-nt | | tcatggatccgccaacctcccgggaaagggcttgaatggattggtgtcatctggg |
| | | gttctgaaaccacctactaccagtcttccctgaagtccagggtgaccatcagcaa |
| | | ggataattccaagaaccaggtcagccttaagctgtcatctgtgaccgctgctgac |
| | | accgccgtgtattactgcgccaagcactactattacggaggaagctacgctatgg |
| | | actattggggacagggcactctcgtgactgtgagcagcggcggtggagggtctgg |
| | | aggtggaggatccggtggtggtgggtcaggcggaggagggagcgagattgtgatg |
| | | actcagtcaccagccaccctttctctttcacccggcgagagagcaaccctgagct |
| | | gtagagccagccaggacatttctaagtacctcaactggtatcagcaaaaaccggg |
| | | gcaggcccctcgcctcctgatctaccatacctcacgccttcactctggtatcccc |
| | | gctcggtttagcggatcaggatctggtaccgactacactctgaccatttccagcc |
| | | tgcagccagaagatttcgcagtgtatttctgccagcagggcaatacccttcctta |
| | | caccttcggtcagggaaccaagctcgaaatcaagcaccatcaccatcatcatcac |
| | | cac |
| 100798 | 930 | MALPVTALLLPLALLLHAARPqvqlqesgpglvkpsetlsltctvsgvslpdygv |
| CAR8- | | swirqppgkglewigviwgsettyyqsslksrvtiskdnsknqvslklssvtaad |
| Soluble | | tavyycakhyyyggsyamdywgqgtlvtvssggggsggggsggggsggggseivm |
| scFv-aa | | tqspatlslspgeratlscrasqdiskylnwyqqkpgqaprlliyhtsrlhsgip |
| | | arfsgsgsgtdytltisslqpedfavyfcqqgntlpytfgqgtkleikhhhhhhh |
| | | h |
| 104882 | 931 | atggctctgcccgtgaccgcactcctcctgccactggctctgctgcttcacgccg |
| CAR8- | | ctcgcccacaagtccagcttcaagaatcagggcctggtctggtgaagccatctga |
| Full-nt | | gactctgtccctcacttgcaccgtgagcggagtgtccctcccagactacggagtg |
| | | agctggattagacagcctcccggaaagggactggagtggatcggagtgatttggg |
| | | gtagcgaaaccacttactatcaatcttccctgaagtcacgggtcaccatttcaaa |
| | | ggataactcaaagaatcaagtgagcctcaagctctcatcagtcaccgccgctgac |
| | | accgccgtgtattactgtgccaagcattactactatggagggtcctacgccatgg |
| | | actactggggccagggaactctggtcactgtgtcatctggtggaggaggtagcgg |
| | | aggaggcgggagcggtggaggtggctccggaggcggtgggtcagaaatcgtgatg |
| | | acccagagccctgcaaccctgtccctttctcccggggaacgggctaccctttctt |
| | | gtcgggcatcacaagatatctcaaaatacctcaattggtatcaacagaagccggg |
| | | acaggcccctaggcttcttatctaccacacctctcgcctgcatagcgggattccc |
| | | gcacgctttagcgggtctggaagcgggaccgactacactctgaccatctcatctc |
| | | tccagcccgaggacttcgccgtctacttctgccagcagggtaacaccctgccgta |
| | | caccttcggccagggcaccaagcttgagatcaaaaccactactcccgctccaagg |
| | | ccacccacccctgccccgaccatcgcctctcagccgctttccctgcgtccggagg |
| | | catgtagacccgcagctggtggggccgtgcatacccggggtcttgacttcgcctg |
| | | cgatatctacatttgggcccctctggctggtacttgcggggtcctgctgctttca |
| | | ctcgtgatcactctttactgtaagcgcggtcggaagaagctgctgtacatcttta |
| | | agcaacccttcatgaggcctgtgcagactactcaagaggaggacggctgttcatg |
| | | ccggttcccagaggaggaggaaggcggctgcgaactgcgcgtgaaattcagccgc |
| | | agcgcagatgctccagcctacaagcaggggcagaaccagctctacaacgaactca |
| | | atcttggtcggagagaggagtacgacgtgctggacaagcggagaggacgggaccc |
| | | agaaatgggcgggaagccgcgcagaaagaatccccaagagggcctgtacaacgag |
| | | ctccaaaaggataagatggcagaagcctatagcgagattggtatgaaaggggaac |
| | | gcagaagaggcaaaggccacgacggactgtaccagggactcagcaccgccaccaa |
| | | ggacacctatgacgctcttcacatgcaggccctgccgcctcgg |
| 104882 | 932 | MALPVTALLLPLALLLHAARPqvqlqesgpglvkpsetlsltctvsgvslpdygv |
| CAR8- | | swirqppgkglewigviwgsettyyqsslksrvtiskdnsknqvslklssvtaad |
| Full-aa | | tavyycakhyyyggsyamdywgqgtlvtvssggggsggggsggggsggggseivm |
| | | tqspatlslspgeratlscrasqdiskylnwyqqkpgqaprlliyhtsrlhsgip |
| | | arfsgsgsgtdytltisslqpedfavyfcqqgntlpytfgqgtkleiktttpapr |
| | | pptpaptiasqplslrpeacrpaaggavhtrgldfacdiyiwaplagtcgvllls |
| | | lvitlyckrgrkkllyifkqpfmrpvqttqeedgcscrfpeeeeggcelrvkfsr |
| | | sadapaykqgqnqlynelnlgrreeydvldkrrgrdpemggkprrknpqeglyne |
| | | lqkdkmaeayseigmkgerrrgkghdglyqglstatkdtydalhmqalppr |

CAR9

| | | |
|---|---|---|
| CAR9 scFv | 933 | eivmtqspatlslspgeratlscrasqdiskylnwyqqkpgqaprlliyhtsrlh |
| domain | | sgiparfsgsgsgtdytltisslqpedfavyfcqqgntlpytfgqgtkleikggg |
| | | gsggggsggggsggggsqvqlqesgpglvkpsetlsltctvsgvslpdygvswir |
| | | qppgkglewigviwgsettyynsslksrvtiskdnsknqvslklssvtaadtavy |
| | | ycakhyyyggsyamdywgqgtlvtvss |
| 99789 | 934 | atggccctcccagtgaccgctctgctgctgcctctcgcacttcttctccatgccg |
| CAR9- | | ctcggcctgagatcgtcatgacccaaagccccgctaccctgtccctgtcacccgg |
| Soluble | | cgagagggcaaccctttcatgcagggccagccaggacatttctaagtacctcaac |
| scFv-nt | | tggtatcagcagaagccagggcaggctcctcgcctgctgatctaccacaccagcc |
| | | gcctccacagcggtatccccgccagattttccgggagcgggtctggaaccgacta |
| | | caccctcaccatctcttctctgcagcccgaggatttcgccgtctatttctgccag |
| | | caggggaatactctgccgtacaccttcggtcaaggtaccaagctggaaatcaagg |
| | | gaggcggaggatcaggcggtggcggaagcggaggaggtggctccggaggaggagg |
| | | ttcccaagtgcagcttcaagaatcaggacccggacttgtgaagccatcagaaacc |
| | | ctctccctgacttgtaccgtgtccggtgtgagcctccccgactacggagtctctt |
| | | ggattcgccagcctccggggaagggtcttgaatggattggggtgatttggggatc |
| | | agagactacttactacaattcatcacttaagtcacgggtcaccatcagcaaagat |
| | | aatagcaagaaccaagtgtcacttaagctgtcatctgtgaccgccgctgacaccg |
| | | ccgtgtactattgtgccaaacattactattacggagggtcttatgctatggacta |
| | | ctggggacaggggaccctggtgactgtctctagccatcaccatcaccaccatcat |
| | | cac |
| 99789 | 935 | MALPVTALLLPLALLLHAARPeivmtqspatlslspgeratlscrasqdiskyln |
| CAR9- | | wyqqkpgqaprlliyhtsrlhsgiparfsgsgsgtdytltisslqpedfavyfcq |
| Soluble | | qgntlpytfgqgtkleikggggsggggsggggsggggsqvqlqesgpglvkpset |
| scFv-aa | | lsltctvsgvslpdygvswirqppgkglewigviwgsettyynsslksrvtiskd |
| | | nsknqvslklssvtaadtavyycakhyyyggsyamdywgqgtlvtvsshhhhhhh |
| | | h |
| 105974 | 936 | atggccctccctgtcaccgccctgctgcttccgctggctcttctgctccacgccg |
| CAR9- | | ctcggcccgaaattgtgatgacccagtcacccgccactcttagcctttcacccgg |
| Full-nt | | tgagcgcgcaaccctgtcttgcagagcctcccaagacatctcaaaataccttaat |
| | | tggtatcaacagaagcccggacaggctcctcgccttctgatctaccacaccagcc |
| | | ggctccattctggaatccctgccaggttcagcggtagcggatctgggaccgacta |
| | | caccctcactatcagctcactgcagccagaggacttcgctgtctatttctgtcag |
| | | caagggaacaccctgccctacacctttggacagggcaccaagctcgagattaaag |
| | | gtggaggtggcagcggaggaggtgggtccggcggtggaggaagcggaggcggtgg |
| | | gagccaggtccaactccaagaaagcggaccgggtcttgtgaagccatcagaaact |
| | | ctttcactgacttgtactgtgagcggagtgtctctccccgattacggggtgtctt |
| | | ggatcagacagccaccggggaagggtctggaatggattggagtgatttggggctc |
| | | tgagactacttactacaactcatccctcaagtcacgcgtcaccatctcaaaggac |
| | | aactctaagaatcaggtgtcactgaaactgtcatctgtgaccgcagccgacaccg |
| | | ccgtgtactattgcgctaagcattactattatggcgggagctacgcaatggatta |
| | | ctggggacagggtactctggtcaccgtgtccagcaccactaccccagcaccgagg |
| | | ccacccaccccggctcctaccatcgcctcccagcctctgtccctgcgtccggagg |
| | | catgtagacccgcagctggtggggccgtgcatacccggggtcttgacttcgcctg |
| | | cgatatctacatttgggcccctctggctggtacttgcggggtcctgctgctttca |
| | | ctcgtgatcactctttactgtaagcgcggtcggaagaagctgctgtacatcttta |
| | | agcaacccttcatgaggcctgtgcagactactcaagaggaggacggctgttcatg |
| | | ccggttcccagaggaggaggaaggcggctgcgaactgcgcgtgaaattcagccgc |
| | | agcgcagatgctccagcctacaagcaggggcagaaccagctctacaacgaactca |
| | | atcttggtcggagagaggagtacgacgtgctggacaagcggagaggacgggaccc |
| | | agaaatgggcgggaagccgcgcagaaagaatccccaagagggcctgtacaacgag |
| | | ctccaaaaggataagatggcagaagcctatagcgagattggtatgaaaggggaac |
| | | gcagaagaggcaaaggccacgacggactgtaccagggactcagcaccgccaccaa |
| | | ggacacctatgacgctcttcacatgcaggccctgccgcctcgg |
| 105974 | 937 | MALPVTALLLPLALLLHAARPeivmtqspatlslspgeratlscrasqdiskyln |
| CAR9- | | wyqqkpgqaprlliyhtsrlhsgiparfsgsgsgtdytltisslqpedfavyfcq |
| Full-aa | | qgntlpytfgqgtkleikggggsggggsggggsggggsqvqlqesgpglvkpset |
| | | lsltctvsgvslpdygvswirqppgkglewigviwgsettyynsslksrvtiskd |
| | | nsknqvslklssvtaadtavyycakhyyyggsyamdywgqgtlvtvsstttpapr |
| | | pptpaptiasqplslrpeacrpaaggavhtrgldfacdiyiwaplagtcgvllls |
| | | lvitlyckrgrkkllyifkqpfmrpvqttqeedgcscrfpeeeeggcelrvkfsr |
| | | sadapaykqgqnqlynelnlgrreeydvldkrrgrdpemggkprrknpqeglyne |
| | | lqkdkmaeayseigmkgerrrgkghdglyqglstatkdtydalhmqalppr |

CAR10

| | | |
|---|---|---|
| CAR10 | 938 | qvqlqesgpglvkpsetlsltctvsgvslpdygvswirqppgkglewigviwgse |
| scFv | | ttyynsslksrvtiskdnsknqvslklssvtaadtavyycakhyyyggsyamdyw |
| domain | | gqgtlvtvssggggsggggsggggsggggseivmtqspatlslspgeratlscra |
| | | sqdiskylnwyqqkpgqaprlliyhtsrlhsgiparfsgsgsgtdytltisslqp |
| | | edfavyfcqqgntlpytfgqgtkleik |
| 100796 | 939 | atggcactgcctgtcactgccctcctgctgcctctggccctccttctgcatgccg |
| CAR10- | | ccaggccccaagtccagctgcaagagtcaggacccggactggtgaagccgtctga |
| Soluble | | gactctctcactgacttgtaccgtcagcggcgtgtccctccccgactacggagtg |
| scFv-nt | | tcatggatccgccaacctcccgggaaagggcttgaatggattggtgtcatctggg |
| | | gttctgaaaccacctactacaactcttccctgaagtccagggtgaccatcagcaa |
| | | ggataattccaagaaccaggtcagccttaagctgtcatctgtgaccgctgctgac |
| | | accgccgtgtattactgcgccaagcactactattacggaggaagctacgctatgg |
| | | actattggggacagggcactctcgtgactgtgagcagcggcggtggagggtctgg |
| | | aggtggaggatccggtggtggtgggtcaggcggaggagggagcgagattgtgatg |
| | | actcagtcaccagccaccctttctctttcacccggcgagagagcaaccctgagct |
| | | gtagagccagccaggacatttctaagtacctcaactggtatcagcaaaaaccggg |
| | | gcaggcccctcgcctcctgatctaccatacctcacgccttcactctggtatcccc |
| | | gctcggtttagcggatcaggatctggtaccgactacactctgaccatttccagcc |
| | | tgcagccagaagatttcgcagtgtatttctgccagcagggcaatacccttcctta |
| | | caccttcggtcagggaaccaagctcgaaatcaagcaccatcaccatcatcaccac |
| | | cat |
| 100796 | 940 | MALPVTALLLPLALLLHAARPqvqlqesgpglvkpsetlsltctvsgvslpdygv |
| CAR10- | | swirqppgkglewigviwgsettyynsslksrvtiskdnsknqvslklssvtaad |
| Soluble | | tavyycakhyyyggsyamdywgqgtlvtvssggggsggggsggggsggggseivm |
| scFv-aa | | tqspatlslspgeratlscrasqdiskylnwyqqkpgqaprlliyhtsrlhsgip |
| | | arfsgsgsgtdytltisslqpedfavyfcqqgntlpytfgqgtkleikhhhhhhh |
| | | h |
| 105975 | 941 | atggccctccctgtcaccgccctgctgcttccgctggctcttctgctccacgccg |
| CAR 10 | | ctcggcccgaaattgtgatgacccagtcacccgccactcttagcctttcacccgg |
| Full-nt | | tgagcgcgcaaccctgtcttgcagagcctcccaagacatctcaaaataccttaat |
| | | tggtatcaacagaagcccggacaggctcctcgccttctgatctaccacaccagcc |
| | | ggctccattctggaatccctgccaggttcagcggtagcggatctgggaccgacta |
| | | caccctcactatcagctcactgcagccagaggacttcgctgtctatttctgtcag |
| | | caagggaacaccctgccctacacctttggacagggcaccaagctcgagattaaag |
| | | gtggaggtggcagcggaggaggtgggtccggcggtggaggaagcggaggcggtgg |
| | | gagccaggtccaactccaagaaagcggaccgggtcttgtgaagccatcagaaact |
| | | ctttcactgacttgtactgtgagcggagtgtctctccccgattacggggtgtctt |
| | | ggatcagacagccaccggggaagggtctggaatggattggagtgatttggggctc |
| | | tgagactacttactacaactcatccctcaagtcacgcgtcaccatctcaaaggac |
| | | aactctaagaatcaggtgtcactgaaactgtcatctgtgaccgcagccgacaccg |
| | | ccgtgtactattgcgctaagcattactattatggcgggagctacgcaatggatta |
| | | ctggggacagggtactctggtcaccgtgtccagcaccactaccccagcaccgagg |
| | | ccacccaccccggctcctaccatcgcctcccagcctctgtccctgcgtccggagg |
| | | catgtagacccgcagctggtggggccgtgcatacccggggtcttgacttcgcctg |
| | | cgatatctacatttgggcccctctggctggtacttgcggggtcctgctgctttca |
| | | ctcgtgatcactctttactgtaagcgcggtcggaagaagctgctgtacatcttta |
| | | agcaacccttcatgaggcctgtgcagactactcaagaggaggacggctgttcatg |
| | | ccggttcccagaggaggaggaaggcggctgcgaactgcgcgtgaaattcagccgc |
| | | agcgcagatgctccagcctacaagcaggggcagaaccagctctacaacgaactca |
| | | atcttggtcggagagaggagtacgacgtgctggacaagcggagaggacgggaccc |
| | | agaaatgggcgggaagccgcgcagaaagaatccccaagagggcctgtacaacgag |
| | | ctccaaaaggataagatggcagaagcctatagcgagattggtatgaaaggggaac |
| | | gcagaagaggcaaaggccacgacggactgtaccagggactcagcaccgccaccaa |
| | | ggacacctatgacgctcttcacatgcaggccctgccgcctcgg |
| 105975 | 942 | MALPVTALLLPLALLLHAARPEIVMTQSPATLSLSPGERATLSCRASQDISKYLN |
| CAR 10 | | WYQQKPGQAPRLLIYHTSRLHSGIPARFSGSGSGTDYTLTISSLQPEDFAVYFCQ |
| Full-aa | | QGNTLPYTFGQGTKLEIKGGGGSGGGGSGGGGSGGGGSQVQLQESGPGLVKPSET |
| | | LSLTCTVSGVSLPDYGVSWIRQPPGKGLEWIGVIWGSETTYYNSSLKSRVTISKD |
| | | NSKNQVSLKLSSVTAADTAVYYCAKHYYYGGSYAMDYWGQGTLVTVSSTTTPAPR |
| | | PPTPAPTIASQPLSLRPEACRPAAGGAVHTRGLDFACDIYIWAPLAGTCGVLLLS |
| | | LVITLYCKRGRKKLLYIFKQPFMRPVQTTQEEDGCSCRFPEEEEGGCELRVKESR |
| | | SADAPAYKQGQNQLYNELNLGRREEYDVLDKRRGRDPEMGGKPRRKNPQEGLYNE |
| | | LQKDKMAEAYSEIGMKGERRRGKGHDGLYQGLSTATKDTYDALHMQALPPR |

CAR11

| | | |
|---|---|---|
| CAR11 | 943 | eivmtqspatlslspgeratlscrasqdiskylnwyqqkpgqaprlliyhtsrlh |
| scFv | | sgiparfsgsgsgtdytltisslqpedfavyfcqqgntlpytfgqgtkleikggg |
| domain | | gsggggsggggsqvqlqesgpglvkpsetlsltctvsgvslpdygvswirqppgk |
| | | glewigviwgsettyynsslksrvtiskdnsknqvslklssvtaadtavyycakh |
| | | yyyggsyamdywgqgtlvtvss |
| 103101 | 944 | Atggccctccctgtcaccgccctgctgcttccgctggctcttctgctccacgccg |
| CAR11- | | ctcggcccgaaattgtgatgacccagtcacccgccactcttagcctttcacccgg |
| Soluble | | tgagcgcgcaaccctgtcttgcagagcctcccaagacatctcaaaataccttaat |
| scFv-nt | | tggtatcaacagaagcccggacaggctcctcgccttctgatctaccacaccagcc |
| | | ggctccattctggaatccctgccaggttcagcggtagcggatctgggaccgacta |
| | | caccctcactatcagctcactgcagccagaggacttcgctgtctatttctgtcag |
| | | caagggaacaccctgccctacacctttggacagggcaccaagctcgagattaaag |
| | | gtggaggtggcagcggaggaggtgggtccggcggtggaggaagccaggtccaact |
| | | ccaagaaagcggaccgggtcttgtgaagccatcagaaactctttcactgacttgt |
| | | actgtgagcggagtgtctctccccgattacggggtgtcttggatcagacagccac |
| | | cggggaagggtctggaatggattggagtgatttggggctctgagactacttacta |
| | | caattcatccctcaagtcacgcgtcaccatctcaaaggacaactctaagaatcag |
| | | gtgtcactgaaactgtcatctgtgaccgcagccgacaccgccgtgtactattgcg |
| | | ctaagcattactattatggcgggagctacgcaatggattactggggacagggtac |
| | | tctggtcaccgtgtccagccaccaccatcatcaccatcaccat |
| 103101 | 945 | MALPVTALLLPLALLLHAARPeivmtqspatlslspgeratlscrasqdiskyln |
| CAR11- | | wyqqkpgqaprlliyhtsrlhsgiparfsgsgsgtdytltisslqpedfavyfcq |
| Soluble | | qgntlpytfgqgtkleikggggsggggsggggsqvqlqesgpglvkpsetlsltc |
| scFv-aa | | tvsgvslpdygvswirqppgkglewigviwgsettyynsslksrvtiskdnsknq |
| | | vslklssvtaadtavyycakhyyyggsyamdywgqgtlvtvsshhhhhhhh |
| 105976 | 946 | atggctctgcccgtgaccgcactcctcctgccactggctctgctgcttcacgccg |
| CAR 11 | | ctcgcccacaagtccagcttcaagaatcagggcctggtctggtgaagccatctga |
| Full-nt | | gactctgtccctcacttgcaccgtgagcggagtgtccctcccagactacggagtg |
| | | agctggattagacagcctcccggaaagggactggagtggatcggagtgatttggg |
| | | gtagcgaaaccacttactataactcttccctgaagtcacgggtcaccatttcaaa |
| | | ggataactcaaagaatcaagtgagcctcaagctctcatcagtcaccgccgctgac |
| | | accgccgtgtattactgtgccaagcattactactatggagggtcctacgccatgg |
| | | actactggggccagggaactctggtcactgtgtcatctggtggaggaggtagcgg |
| | | aggaggcgggagcggtggaggtggctccggaggtggcggaagcgaaatcgtgatg |
| | | acccagagccctgcaaccctgtccctttctcccggggaacgggctaccctttctt |
| | | gtcgggcatcacaagatatctcaaaatacctcaattggtatcaacagaagccggg |
| | | acaggcccctaggcttcttatctaccacacctctcgcctgcatagcgggattccc |
| | | gcacgctttagcgggtctggaagcgggaccgactacactctgaccatctcatctc |
| | | tccagcccgaggacttcgccgtctacttctgccagcagggtaacaccctgccgta |
| | | caccttcggccagggcaccaagcttgagatcaaaaccactactcccgctccaagg |
| | | ccacccacccctgccccgaccatcgcctctcagccgctttccctgcgtccggagg |
| | | catgtagacccgcagctggtggggccgtgcatacccggggtcttgacttcgcctg |
| | | cgatatctacatttgggcccctctggctggtacttgcggggtcctgctgctttca |
| | | ctcgtgatcactctttactgtaagcgcggtcggaagaagctgctgtacatcttta |
| | | agcaacccttcatgaggcctgtgcagactactcaagaggaggacggctgttcatg |
| | | ccggttcccagaggaggaggaaggcggctgcgaactgcgcgtgaaattcagccgc |
| | | agcgcagatgctccagcctacaagcaggggcagaaccagctctacaacgaactca |
| | | atcttggtcggagagaggagtacgacgtgctggacaagcggagaggacgggaccc |
| | | agaaatgggcgggaagccgcgcagaaagaatccccaagagggcctgtacaacgag |
| | | ctccaaaaggataagatggcagaagcctatagcgagattggtatgaaaggggaac |
| | | gcagaagaggcaaaggccacgacggactgtaccagggactcagcaccgccaccaa |
| | | ggacacctatgacgctcttcacatgcaggccctgccgcctcgg |
| 105976 | 947 | MALPVTALLLPLALLLHAARPQVQLQESGPGLVKPSETLSLTCTVSGVSLPDYGV |
| CAR 11 | | SWIRQPPGKGLEWIGVIWGSETTYYNSSLKSRVTISKDNSKNQVSLKLSSVTAAD |
| Full-aa | | TAVYYCAKHYYYGGSYAMDYWGQGTLVTVSSGGGGSGGGGSGGGGSGGGGSEIVM |
| | | TQSPATLSLSPGERATLSCRASQDISKYLNWYQQKPGQAPRLLIYHTSRLHSGIP |
| | | ARFSGSGSGTDYTLTISSLQPEDFAVYFCQQGNTLPYTFGQGTKLEIKTTTPAPR |
| | | PPTPAPTIASQPLSLRPEACRPAAGGAVHTRGLDFACDIYIWAPLAGTCGVLLLS |
| | | LVITLYCKRGRKKLLYIFKQPFMRPVQTTQEEDGCSCRFPEEEEGGCELRVKESR |
| | | SADAPAYKQGQNQLYNELNLGRREEYDVLDKRRGRDPEMGGKPRRKNPQEGLYNE |
| | | LQKDKMAEAYSEIGMKGERRRGKGHDGLYQGLSTATKDTYDALHMQALPPR |

CAR12

| | | |
|---|---|---|
| CAR12 | 948 | qvqlqesgpglvkpsetlsltctvsgvslpdygvswirqppgkglewigviwgse |
| scFv | | ttyynsslksrvtiskdnsknqvslklssvtaadtavyycakhyyyggsyamdyw |
| domain | | gqgtlvtvssggggsggggsggggseivmtqspatlslspgeratlscrasqdis |
| | | kylnwyqqkpgqaprlliyhtsrlhsgiparfsgsgsgtdytltisslqpedfav |
| | | yfcqqgntlpytfgqgtkleik |
| 103104 | 949 | atggctctgcccgtgaccgcactcctcctgccactggctctgctgcttcacgccg |
| CAR12- | | ctcgcccacaagtccagcttcaagaatcagggcctggtctggtgaagccatctga |
| Soluble | | gactctgtccctcacttgcaccgtgagcggagtgtccctcccagactacggagtg |
| scFv-nt | | agctggattagacagcctcccggaaagggactggagtggatcggagtgatttggg |
| | | gtagcgaaaccacttactataactcttccctgaagtcacgggtcaccatttcaaa |
| | | ggataactcaaagaatcaagtgagcctcaagctctcatcagtcaccgccgctgac |
| | | accgccgtgtattactgtgccaagcattactactatggagggtcctacgccatgg |
| | | actactggggccagggaactctggtcactgtgtcatctggtggaggaggtagcgg |
| | | aggaggcgggagcggtggaggtggctccgaaatcgtgatgacccagagccctgca |
| | | accctgtccctttctcccggggaacgggctaccctttcttgtcgggcatcacaag |
| | | atatctcaaaatacctcaattggtatcaacagaagccgggacaggcccctaggct |
| | | tcttatctaccacacctctcgcctgcatagcgggattcccgcacgctttagcggg |
| | | tctggaagcgggaccgactacactctgaccatctcatctctccagcccgaggact |
| | | tcgccgtctacttctgccagcagggtaacaccctgccgtacaccttcggccaggg |
| | | caccaagcttgagatcaaacatcaccaccatcatcaccatcac |
| 103104 | 950 | MALPVTALLLPLALLLHAARPqvqlqesgpglvkpsetlsltctvsgvslpdygv |
| CAR12- | | swirqppgkglewigviwgsettyynsslksrvtiskdnsknqvslklssvtaad |
| Soluble | | tavyycakhyyyggsyamdywgqgtlvtvssggggsggggsggggseivmtqspa |
| scFv-aa | | tlslspgeratlscrasqdiskylnwyqqkpgqaprlliyhtsrlhsgiparfsg |
| | | sgsgtdytltisslqpedfavyfcqqgntlpytfgqgtkleikhhhhhhhh |
| 105977 | 951 | atggccctccctgtcaccgccctgctgcttccgctggctcttctgctccacgccg |
| CAR 12- | | ctcggcccgaaattgtgatgacccagtcacccgccactcttagcctttcacccgg |
| Full-nt | | tgagcgcgcaaccctgtcttgcagagcctcccaagacatctcaaaataccttaat |
| | | tggtatcaacagaagcccggacaggctcctcgccttctgatctaccacaccagcc |
| | | ggctccattctggaatccctgccaggttcagcggtagcggatctgggaccgacta |
| | | caccctcactatcagctcactgcagccagaggacttcgctgtctatttctgtcag |
| | | caagggaacaccctgccctacacctttggacagggcaccaagctcgagattaaag |
| | | gtggaggtggcagcggaggaggtgggtccggcggtggaggaagccaggtccaact |
| | | ccaagaaagcggaccgggtcttgtgaagccatcagaaactctttcactgacttgt |
| | | actgtgagcggagtgtctctccccgattacggggtgtcttggatcagacagccac |
| | | cggggaagggtctggaatggattggagtgatttggggctctgagactacttacta |
| | | caactcatccctcaagtcacgcgtcaccatctcaaaggacaactctaagaatcag |
| | | gtgtcactgaaactgtcatctgtgaccgcagccgacaccgccgtgtactattgcg |
| | | ctaagcattactattatggcgggagctacgcaatggattactggggacagggtac |
| | | tctggtcaccgtgtccagcaccactaccccagcaccgaggccacccaccccggct |
| | | cctaccatcgcctcccagcctctgtccctgcgtccggaggcatgtagacccgcag |
| | | ctggtggggccgtgcatacccggggtcttgacttcgcctgcgatatctacatttg |
| | | ggcccctctggctggtacttgcggggtcctgctgctttcactcgtgatcactctt |
| | | tactgtaagcgcggtcggaagaagctgctgtacatctttaagcaacccttcatga |
| | | ggcctgtgcagactactcaagaggaggacggctgttcatgccggttcccagagga |
| | | ggaggaaggcggctgcgaactgcgcgtgaaattcagccgcagcgcagatgctcca |
| | | gcctacaagcaggggcagaaccagctctacaacgaactcaatcttggtcggagag |
| | | aggagtacgacgtgctggacaagcggagaggacgggacccagaaatgggcgggaa |
| | | gccgcgcagaaagaatccccaagagggcctgtacaacgagctccaaaaggataag |
| | | atggcagaagcctatagcgagattggtatgaaaggggaacgcagaagaggcaaag |
| | | gccacgacggactgtaccagggactcagcaccgccaccaaggacacctatgacgc |
| | | tcttcacatgcaggccctgccgcctcgg |
| 105977 | 952 | MALPVTALLLPLALLLHAARPEIVMTQSPATLSLSPGERATLSCRASQDISKYLN |
| CAR 12- | | WYQQKPGQAPRLLIYHTSRLHSGIPARFSGSGSGTDYTLTISSLQPEDFAVYFCQ |
| Full-aa | | QGNTLPYTFGQGTKLEIKGGGGSGGGGSGGGGSQVQLQESGPGLVKPSETLSLTC |
| | | TVSGVSLPDYGVSWIRQPPGKGLEWIGVIWGSETTYYNSSLKSRVTISKDNSKNQ |
| | | VSLKLSSVTAADTAVYYCAKHYYYGGSYAMDYWGQGTLVTVSSTTTPAPRPPTPA |
| | | PTIASQPLSLRPEACRPAAGGAVHTRGLDFACDIYIWAPLAGTCGVLLLSLVITL |
| | | YCKRGRKKLLYIFKQPFMRPVQTTQEEDGCSCRFPEEEEGGCELRVKESRSADAP |
| | | AYKQGQNQLYNELNLGRREEYDVLDKRRGRDPEMGGKPRRKNPQEGLYNELQKDK |
| | | [sequence omitted] |

CTL019

| | | |
|---|---|---|
| CTL019- | 953 | atggccctgcccgtcaccgctctgctgctgccccttgctctgcttcttcatgcag |
| Soluble | | caaggccggacatccagatgacccaaaccacctcatccctctctgcctctcttgg |
| scFv-Histag- | | agacagggtgaccatttcttgtcgcgccagccaggacatcagcaagtatctgaac |
| nt | | tggtatcagcagaagccggacggaaccgtgaagctcctgatctaccatacctctc |
| | | gcctgcatagcggcgtgccctcacgcttctctggaagcggatcaggaaccgatta |
| | | ttctctcactatttcaaatcttgagcaggaagatattgccacctatttctgccag |
| | | cagggtaataccctgccctacaccttcggaggagggaccaagctcgaaatcaccg |
| | | gtggaggaggcagcggcggtggagggtctggtggaggtggttctgaggtgaagct |
| | | gcaagaatcaggccctggacttgtggccccttcacagtccctgagcgtgacttgc |
| | | accgtgtccggagtctccctgcccgactacggagtgtcatggatcagacaacctc |
| | | cacggaaaggactggaatggctcggtgtcatctggggtagcgaaactacttacta |
| | | caattcagccctcaaaagcaggctgactattatcaaggacaacagcaagtcccaa |
| | | gtctttcttaagatgaactcactccagactgacgacaccgcaatctactattgtg |
| | | ctaagcactactactacggaggatcctacgctatggattactggggacaaggtac |
| | | ttccgtcactgtctcttcacaccatcatcaccatcaccatcac |
| CTL019- | 954 | MALPVTALLLPLALLLHAARPdiqmtqttsslsaslgdrvtiscrasqdiskyln |
| Soluble | | wyqqkpdgtvklliyhtsrlhsgvpsrfsgsgsgtdysltisnlegediatyfcq |
| scFv-Histag- | | qgntlpytfgggtkleitggggsggggsggggsevklqesgpglvapsqslsvtc |
| aa | | tvsgvslpdygvswirqpprkglewlgviwgsettyynsalksrltiikdnsksq |
| | | vflkmnslqtddtaiyycakhyyyggsyamdywgqgtsvtvsshhhhhhhh |
| CTL019 | 955 | atggccttaccagtgaccgccttgctcctgccgctggccttgctgctccacgccg |
| Full-nt | | ccaggccggacatccagatgacacagactacatcctccctgtctgcctctctggg |
| | | agacagagtcaccatcagttgcagggcaagtcaggacattagtaaatatttaaat |
| | | tggtatcagcagaaaccagatggaactgttaaactcctgatctaccatacatcaa |
| | | gattacactcaggagtcccatcaaggttcagtggcagtgggtctggaacagatta |
| | | ttctctcaccattagcaacctggagcaagaagatattgccacttacttttgccaa |
| | | cagggtaatacgcttccgtacacgttcggaggggggaccaagctggagatcacag |
| | | gtggcggtggctcgggcggtggtgggtcgggtggcggcggatctgaggtgaaact |
| | | gcaggagtcaggacctggcctggtggcgccctcacagagcctgtccgtcacatgc |
| | | actgtctcaggggtctcattacccgactatggtgtaagctggattcgccagcctc |
| | | cacgaaagggtctggagtggctgggagtaatatggggtagtgaaaccacatacta |
| | | taattcagctctcaaatccagactgaccatcatcaaggacaactccaagagccaa |
| | | gttttcttaaaaatgaacagtctgcaaactgatgacacagccatttactactgtg |
| | | ccaaacattattactacggtggtagctatgctatggactactggggccaaggaac |
| | | ctcagtcaccgtctcctcaaccacgacgccagcgccgcgaccaccaacaccggcg |
| | | cccaccatcgcgtcgcagcccctgtccctgcgcccagaggcgtgccggccagcgg |
| | | cggggggcgcagtgcacacgagggggctggacttcgcctgtgatatctacatctg |
| | | ggcgcccttggccgggacttgtggggtccttctcctgtcactggttatcaccctt |
| | | tactgcaaacggggcagaaagaaactcctgtatatattcaaacaaccatttatga |
| | | gaccagtacaaactactcaagaggaagatggctgtagctgccgatttccagaaga |
| | | agaagaaggaggatgtgaactgagagtgaagttcagcaggagcgcagacgccccc |
| | | gcgtacaagcagggccagaaccagctctataacgagctcaatctaggacgaagag |
| | | aggagtacgatgttttggacaagagacgtggccgggaccctgagatggggggaaa |
| | | gccgagaaggaagaaccctcaggaaggcctgtacaatgaactgcagaaagataag |
| | | atggcggaggcctacagtgagattgggatgaaaggcgagcgccggaggggcaagg |
| | | ggcacgatggcctttaccagggtctcagtacagccaccaaggacacctacgacgc |
| | | ccttcacatgcaggccctgccccctcgc |
| CTL019 | 956 | MALPVTALLLPLALLLHAARPdiqmtqttsslsaslgdrvtiscrasqdiskyln |
| Full-aa | | wyqqkpdgtvklliyhtsrlhsgvpsrfsgsgsgtdysltisnlegediatyfcq |
| | | qgntlpytfgggtkleitggggsggggsggggsevklqesgpglvapsqslsvtc |
| | | tvsgvslpdygvswirqpprkglewlgviwgsettyynsalksrltiikdnsksq |
| | | vflkmnslqtddtaiyycakhyyyggsyamdywgqgtsvtvsstttpaprpptpa |
| | | ptiasqplslrpeacrpaaggavhtrgldfacdiyiwaplagtcgvlllslvitl |
| | | yckrgrkkllyifkqpfmrpvqttqeedgcscrfpeeeeggcelrvkfsrsadap |
| | | aykqgqnqlynelnlgrreeydvldkrrgrdpemggkprrknpqeglynelqkdk |
| | | [sequence omitted] |
| CTL019 | 957 | diqmtqttsslsaslgdrvtiscrasqdiskylnwyqqkpdgtvklliyhtsrlh |
| scFv | | sgvpsrfsgsgsgtdysltisnlegediatyfcqqgntlpytfgggtkleitggg |
| domain | | gsggggsggggsevklqesgpglvapsqslsvtctvsgvslpdygvswirqpprk |
| | | glewlgviwgsettyynsalksrltiikdnsksqvflkmnslqtddtaiyycakh |
| | | yyyggsyamdywgqgtsvtvss |
| mCAR1 | 417 | QVQLLESGAELVRPGSSVKISCKASGYAFSSYWMNWVKQRPGQGLEWIGQIYPGD |
| scFv | | GDTNYNGKFKGQATLTADKSSSTAYMQLSGLTSEDSAVYSCARKTISSVVDFYED |
| | | YWGQGTTVTGGGSGGGSGGGSGGGSELVLTQSPKFMSTSVGDRVSVTCKASQNVG |
| | | TNVAWYQQKPGQSPKPLIYSATYRNSGVPDRFTGSGSGTDFTLTITNVQSKDLAD |
| | | YFCQYNRYPYTSFFFTKLEIKRRS |
| mCAR1 | 1937 | QVQLLESGAELVRPGSSVKISCKASGYAFSSYWMNWVKQRPGQGLEWIGQIYPGD |
| Full-aa | | GDTNYNGKFKGQATLTADKSSSTAYMQLSGLTSEDSAVYSCARKTISSVVDFYED |
| | | YWGQGTTVTGGGSGGGSGGGSGGGSELVLTQSPKFMSTSVGDRVSVTCKASQNVG |
| | | TNVAWYQQKPGQSPKPLIYSATYRNSGVPDRFTGSGSGTDFTLTITNVQSKDLAD |
| | | YFCQYNRYPYTSFFFTKLEIKRRSKIEVMYPPPYLDNEKSNGTIIHVKGKHLCPS |
| | | PLFPGPSKPFWVLVVVGGVLACYSLLVTVAFIIFWVRSKRSRLLHSDYMNMTPRR |
| | | PGPTRKHYQPYAPPRDFAAYRSRVKESRSADAPAYQQGQNQLYNELNLGRREEYD |
| | | VLDKRRGRDPEMGGKPRRKNPQEGLYNELQKDKMAEAYSEIGMKGERRRGKGHDG |
| | | LYQGLSTATKDTYDALHMQALPPR |
| mCAR2 | 423 | DIQMTQTTSSLSASLGDRVTISCRASQDISKYLNWYQQKPDGTVKLLIYHTSRLH |
| scFv | | SGVPSRFSGSGSGTDYSLTISNLEQEDIATYFCQQGNTLPYTFGGGTKLEITGST |
| | | SGSGKPGSGEGSTKGEVKLQESGPGLVAPSQSLSVTCTVSGVSLPDYGVSWIRQP |
| | | PRKGLEWLGVIWGSETTYYNSALKSRLTIIKDNSKSQVFLKMNSLQTDDTAIYYC |
| | | AKHYYYGGSYAMDYWGQGTSVTVSSE |
| mCAR2 | 1938 | DIQMTQTTSSLSASLGDRVTISCRASQDISKYLNWYQQKPDGTVKLLIYHTSRLH |
| CAR-aa | | SGVPSRESGSGSGTDYSLTISNLEQEDIATYFCQQGNTLPYTFGGGTKLEITGST |
| | | SGSGKPGSGEGSTKGEVKLQESGPGLVAPSQSLSVTCTVSGVSLPDYGVSWIRQP |
| | | PRKGLEWLGVIWGSETTYYNSALKSRLTIIKDNSKSQVFLKMNSLQTDDTAIY |
| | | YCAKHYYYGGSYAMDYWGQGTSVTVSSESKYGPPCPPCPMFWVLVVVGGVLACYS |
| | | LLVTVAFIIFWVKRGRKKLLYIFKQPFMRPVQTTQEEDGCSCRFEEEEGGCELRV |
| | | KFSRSADAPAYQQGQNQLYNELNLGRREEYDVLDKRRGRDPEMGGKPRRKNPQEG |
| | | LYNELQKDKMAEAYSEIGMKGERRRGKGHDGLYQGLSTATKDTYDALHMQALPPR |
| | | L |
| mCAR2 | 1939 | DIQMTQTT SSLSASLGDR VTISCRASQD ISKYLNWYQQ KPDGTVKLLI |
| Full-aa | | YHTSRLHSGV PSRFSGSGSG TDYSLTISNL EQEDIATYFC QQGNTLPYTF |
| | | GGGTKLEITG STSGSGKPGS GEGSTKGEVK LQESGPGLVA PSQSLSVTCT |
| | | VSGVSLPDYG VSWIRQPPRK GLEWLGVIWG SETTYYNSAL KSRLTIIKDN |
| | | SKSQVFLKMN SLQTDDTAIY YCAKHYYYGG SYAMDYWGQG TSVTVSSESK |
| | | YGPPCPPCPM FWVLVVVGGV LACYSLLVTV |
| | | AFIIFWVKRG RKKLLYIFKQ PFMRPVQTTQ EEDGCSCRFE EEEGGCELRV |
| | | KFSRSADAPA YQQGQNQLYN ELNLGRREEY DVLDKRRGRD PEMGGKPRRK |
| | | NPQEGLYNEL QKDKMAEAYS EIGMKGERRR GKGHDGLYQG LSTATKDTYD |
| | | ALHMQALPPR LEGGGEGRGS LLTCGDVEEN PGPRMLLLVT SLLLCELPHP |
| | | AFLLIPRKVC NGIGIGEFKD SLSINATNIK HEKNCTSISG DLHILPVAFR |
| | | GDSFTHTPPL DPQELDILKT VKEITGELLI QAWPENRTDL HAFENLEIIR |
| | | GRTKQHGQFS LAVVSLNITS LGLRSLKEIS DGDVIISGNK NLCYANTINW |
| | | KKLFGTSGQK TKIISNRGEN SCKATGQVCH ALCSPEGCWG PEPRDCVSCR |
| | | NVSRGRECVD KCNLLEGEPR EFVENSECIQ CHPECLPQAM NITCTGRGPD |
| | | NCIQCAHYID GPHCVKTCPA GVMGENNTLV WKYADAGHVC HLCHPNCTYG |
| | | CTGPGLEGCP TNGPKIPSIA TGMVGALLLL LVVALGIGLE M |
| mCAR3 | 411 | DIQMTQTTSSLSASLGDRVTISCRASQDISKYLNWYQQKPDGTVKLLIYHTSRLH |
| scFv | | SGVPSRESGSGSGTDYSLTISNLEQEDIATYFCQQGNTLPYTFGGGTKLEITGST |
| | | SGSGKPGSGEGSTKGEVKLQESGPGLVAPSQSLSVTCTVSGVSLPDYGVSWIRQP |
| | | PRKGLEWLGVIWGSETTYYNSALKSRLTIIKDNSKSQVFLKMNSLQTDDTAIYYC |
| | | AKHYYYGGSYAMDYWGQGTSVTVSS |
| mCAR3 | 1940 | DIQMTQTTSSLSASLGDRVTISCRASQDISKYLNWYQQKPDGTVKLLIYHTSRLH |
| Full-aa | | SGVPSRFSGSGSGTDYSLTISNLEQEDIATYFCQQGNTLPYTFGGGTKLEITGST |
| | | SGSGKPGSGEGSTKGEVKLQESGPGLVAPSQSLSVTCTVSGVSLPDYGVSWIRQP |
| | | PRKGLEWLGVIWGSETTYYNSALKSRLTIIKDNSKSQVFLKMNSLQTDDTAIYYC |
| | | AKHYYYGGSYAMDYWGQGTSVTVSSAAAIEVMYPPPYLDNEKSNGTIIHVKGKHL |
| | | CPSPLFPGPSKPFWVLVVVGGVLACYSLLVTVAFIIFWVRSKRSRLLHSDYMNMT |
| | | PRRPGPTRKHYQPYAPPRDFAAYRSRVKFSRSADAPAYQQGQNQLYNELNLGRRE |
| | | EYDVLDKRRGRDPEMGGKPRRKNPQEGLYNELQKDKMAEAYSEIGMKGERRRGKG |
| | | HDGLYQGLSTATKDTYDALHMQALPPR |
| SSJ25-C1 | 416 | QVQLLESGAELVRPGSSVKISCKASGYAFSSYWMNWVKQRPGQGLEWIGQIYPGD |
| VH | | GDTNYNGKFKGQATLTADKSSSTAYMQLSGLTSEDSAVYSCARKTISSVVDFYFD |
| sequence | | YWGQGTTVT |
| SSJ25-C1 | 1941 | ELVLTQSPKFMSTSVGDRVSVTCKASQNVGTNVAWYQQKPGQSPKPLIYSATYRN |
| VL | | SGVPDRFTGSGSGTDFTLTITNVQSKDLADYFYFCQYNRYPYTSGGGTKLEIKRR |
| sequence | | S |

[0697] In some embodiments, the CD19 CAR or binding domain includes the amino acid sequence of CTL019, or is encoded by the nucleotide sequence of CTL019 according to Table 5 with or without the leader sequence or the his tag, or a sequence substantially identical thereto (e.g., at least 85%, 90%, 95% or higher identity).

[0698] In some embodiments, the CDRs are defined according to the Kabat numbering scheme, the Chothia numbering scheme, or a combination thereof.

[0699] The sequences of humanized CDR sequences of the scFv domains are shown in Table 6A for the heavy chain variable domains and in Table 6B for the light chain variable domains. “ID” stands for the respective SEQ ID NO for each CDR.

TABLE 6A
Heavy Chain Variable Domain CDRs (according to Kabat)

| | | | SEQ | | SEQ | | SEQ |
|---|---|---|---|---|---|---|---|
| | | | ID | | ID | | ID |
| Candidate | FW | HCDR1 | NO | HCDR2 | NO | HCDR3 | NO |
| murine_CART19 | | DYGVS | 958 | VIWGSETTYYNSALKS | 959 | HYYYGGSYAMDY | 960 |
| humanized_CART19a | VH4 | DYGVS | 958 | VIWGSETTYYSSSLKS | 961 | HYYYGGSYAMDY | 960 |
| humanized_CART19b | VH4 | DYGVS | 958 | VIWGSETTYYQSSLKS | 962 | HYYYGGSYAMDY | 960 |
| humanized_CART19c | VH4 | DYGVS | 958 | VIWGSETTYYNSSLKS | 963 | HYYYGGSYAMDY | 960 |

TABLE 6B
Light Chain Variable Domain CDRs (according to Kabat)

| | | | SEQ | | SEQ | | SEQ |
|---|---|---|---|---|---|---|---|
| | | | ID | | ID | | ID |
| Candidate | FW | LCDR1 | NO | LCDR2 | NO | LCDR3 | NO |
| murine_CART19 | | RASQDISKYLN | 964 | HTSRLHS | 965 | QQGNTLPYT | 966 |
| humanized_CART19a | VK3 | RASQDISKYLN | 964 | HTSRLHS | 965 | QQGNTLPYT | 966 |
| humanized_CART19b | VK3 | RASQDISKYLN | 964 | HTSRLHS | 965 | QQGNTLPYT | 966 |
| humanized_CART19c | VK3 | RASQDISKYLN | 964 | HTSRLHS | 965 | QQGNTLPYT | 966 |

[0700] In one embodiment, the CAR molecule comprises a BCMA CAR molecule described herein, e.g., a BCMA CAR described in US-2016-0046724-A1 or WO2016/014565. In embodiments, the BCMA CAR comprises an amino acid, or has a nucleotide sequence of a CAR molecule, or an antigen binding domain according to US-2016-0046724-A1, or Table 1 or 16, SEQ ID NO: 271 or SEQ ID NO: 273 of WO2016/014565, incorporated herein by reference, or a sequence substantially identical to any of the aforesaid sequences (e.g., at least 85%, 90%, 95% or more identical to any of the aforesaid BCMA CAR sequences). The amino acid and nucleotide sequences encoding the BCMA CAR molecules and antigen binding domains (e.g., including one, two, three VH CDRs; and one, two, three VL CDRs according to Kabat or Chothia), are specified in WO2016/014565.

[0701] In embodiments, the BCMA CAR comprises an anti-BCMA binding domain (e.g., human or humanized anti-BCMA binding domain), a transmembrane domain, and an intracellular signaling domain, and wherein said anti-BCMA binding domain comprises a heavy chain complementary determining region 1 (HC CDR1), a heavy chain complementary determining region 2 (HC CDR2), and a heavy chain complementary determining region 3 (HC CDR3) of any anti-BMCA heavy chain binding domain amino acid sequences listed in Table 7 or 8, or a sequence at least 85%, 90%, 95% or more identical thereto (e.g., having less than 5, 4, 3, 2 or 1 amino acid substitutions, e.g., conservative substitutions).

[0702] In one embodiment, the anti-BCMA binding domain comprises a light chain variable region described herein (e.g., in Table 7 or 8) and/or a heavy chain variable region described herein (e.g., in Table 7 or 8), or a sequence at least 85%, 90%, 95% or more identical thereto.

[0703] In one embodiment, the encoded anti-BCMA binding domain is a scFv comprising a light chain and a heavy chain of an amino acid sequence of Table 7 or 8.

[0704] In an embodiment, the human or humanized anti-BCMA binding domain (e.g., an scFv) comprises: a light chain variable region comprising an amino acid sequence having at least one, two or three modifications (e.g., substitutions, e.g., conservative substitutions) but not more than 30, 20 or 10 modifications (e.g., substitutions, e.g., conservative substitutions) of an amino acid sequence of a light chain variable region provided in Table 7 or 8, or a sequence at least 85%, 90%, 95% or more identical thereto; and/or a heavy chain variable region comprising an amino acid sequence having at least one, two or three modifications (e.g., substitutions, e.g., conservative substitutions) but not more than 30, 20 or 10 modifications (e.g., substitutions, e.g., conservative substitutions) of an amino acid sequence of a heavy chain variable region provided in Table 7 or 8, or a sequence at least 85%, 90%, 95% or more identical thereto.

TABLE 7
Amino Acid and Nucleic Acid Sequences of exemplary anti-BCMA scFv domains
and BCMA CAR molecules

| | | |
|---|---|---|
| | SEQ | |
| Name/ | ID | |
| Description | NO: | Sequence |

139109

| | | |
|---|---|---|
| 139109-aa | 967 | EVQLVESGGGLVQPGGSLRLSCAVSGFALSNHGMSWVRRAPGKGLEWV |
| ScFv | | SGIVYSGSTYYAASVKGRFTISRDNSRNTLYLQMNSLRPEDTAIYYCS |
| domain | | AHGGESDVWGQGTTVTVSSASGGGGSGGRASGGGGSDIQLTQSPSSLS |
| | | ASVGDRVTITCRASQSISSYLNWYQQKPGKAPKLLIYAASSLQSGVPS |
| | | RFSGSGSGTDFTLTISSLQPEDFATYYCQQSYSTPYTFGQGTKVEIK |
| 139109-nt | 968 | GAAGTGCAATTGGTGGAATCAGGGGGAGGACTTGTGCAGCCTGGAGGA |
| ScFv | | TCGCTGAGACTGTCATGTGCCGTGTCCGGCTTTGCCCTGTCCAACCAC |
| domain | | GGGATGTCCTGGGTCCGCCGCGCGCCTGGAAAGGGCCTCGAATGGGTG |
| | | TCGGGTATTGTGTACAGCGGTAGCACCTACTATGCCGCATCCGTGAAG |
| | | GGGAGATTCACCATCAGCCGGGACAACTCCAGGAACACTCTGTACCTC |
| | | CAAATGAATTCGCTGAGGCCAGAGGACACTGCCATCTACTACTGCTCC |
| | | GCGCATGGCGGAGAGTCCGACGTCTGGGGACAGGGGACCACCGTGACC |
| | | GTGTCTAGCGCGTCCGGCGGAGGCGGCAGCGGGGGTCGGGCATCAGGG |
| | | GGCGGCGGATCGGACATCCAGCTCACCCAGTCCCCGAGCTCGCTGTCC |
| | | GCCTCCGTGGGAGATCGGGTCACCATCACGTGCCGCGCCAGCCAGTCG |
| | | ATTTCCTCCTACCTGAACTGGTACCAACAGAAGCCCGGAAAAGCCCCG |
| | | AAGCTTCTCATCTACGCCGCCTCGAGCCTGCAGTCAGGAGTGCCCTCA |
| | | CGGTTCTCCGGCTCCGGTTCCGGTACTGATTTCACCCTGACCATTTCC |
| | | TCCCTGCAACCGGAGGACTTCGCTACTTACTACTGCCAGCAGTCGTAC |
| | | TCCACCCCCTACACTTTCGGACAAGGCACCAAGGTCGAAATCAAG |
| 139109-aa | 969 | EVQLVESGGGLVQPGGSLRLSCAVSGFALSNHGMSWVRRAPGKGLEWV |
| VH | | SGIVYSGSTYYAASVKGRFTISRDNSRNTLYLQMNSLRPEDTAIYYCS |
| | | AHGGESDVWGQGTTVTVSS |
| 139109-aa | 970 | DIQLTQSPSSLSASVGDRVTITCRASQSISSYLNWYQQKPGKAPKLLI |
| VL | | YAASSLQSGVPSRESGSGSGTDFTLTISSLQPEDFATYYCQQSYSTPY |
| | | TFGQGTKVEIK |
| 139109-aa | 971 | MALPVTALLLPLALLLHAARPEVQLVESGGGLVQPGGSLRLSCAVSGF |
| Full CAR | | ALSNHGMSWVRRAPGKGLEWVSGIVYSGSTYYAASVKGRFTISRDNSR |
| | | NTLYLQMNSLRPEDTAIYYCSAHGGESDVWGQGTTVTVSSASGGGGSG |
| | | GRASGGGGSDIQLTQSPSSLSASVGDRVTITCRASQSISSYLNWYQQK |
| | | PGKAPKLLIYAASSLQSGVPSRFSGSGSGTDFTLTISSLQPEDFATYY |
| | | CQQSYSTPYTFGQGTKVEIKTTTPAPRPPTPAPTIASQPLSLRPEACR |
| | | PAAGGAVHTRGLDFACDIYIWAPLAGTCGVLLLSLVITLYCKRGRKKL |
| | | LYIFKQPFMRPVQTTQEEDGCSCRFPEEEEGGCELRVKFSRSADAPAY |
| | | KQGQNQLYNELNLGRREEYDVLDKRRGRDPEMGGKPRRKNPQEGLYNE |
| | | LQKDKMAEAYSEIGMKGERRRGKGHDGLYQGLSTATKDTYDALHMQAL |
| | | PPR |
| 139109-nt | 972 | ATGGCCCTCCCTGTCACCGCCCTGCTGCTTCCGCTGGCTCTTCTGCTC |
| Full CAR | | CACGCCGCTCGGCCCGAAGTGCAATTGGTGGAATCAGGGGGAGGACTT |
| | | GTGCAGCCTGGAGGATCGCTGAGACTGTCATGTGCCGTGTCCGGCTTT |
| | | GCCCTGTCCAACCACGGGATGTCCTGGGTCCGCCGCGCGCCTGGAAAG |
| | | GGCCTCGAATGGGTGTCGGGTATTGTGTACAGCGGTAGCACCTACTAT |
| | | GCCGCATCCGTGAAGGGGAGATTCACCATCAGCCGGGACAACTCCAGG |
| | | AACACTCTGTACCTCCAAATGAATTCGCTGAGGCCAGAGGACACTGCC |
| | | ATCTACTACTGCTCCGCGCATGGCGGAGAGTCCGACGTCTGGGGACAG |
| | | GGGACCACCGTGACCGTGTCTAGCGCGTCCGGCGGAGGCGGCAGCGGG |
| | | GGTCGGGCATCAGGGGGCGGCGGATCGGACATCCAGCTCACCCAGTCC |
| | | CCGAGCTCGCTGTCCGCCTCCGTGGGAGATCGGGTCACCATCACGTGC |
| | | CGCGCCAGCCAGTCGATTTCCTCCTACCTGAACTGGTACCAACAGAAG |
| | | CCCGGAAAAGCCCCGAAGCTTCTCATCTACGCCGCCTCGAGCCTGCAG |
| | | TCAGGAGTGCCCTCACGGTTCTCCGGCTCCGGTTCCGGTACTGATTTC |
| | | ACCCTGACCATTTCCTCCCTGCAACCGGAGGACTTCGCTACTTACTAC |
| | | TGCCAGCAGTCGTACTCCACCCCCTACACTTTCGGACAAGGCACCAAG |
| | | GTCGAAATCAAGACCACTACCCCAGCACCGAGGCCACCCACCCCGGCT |
| | | CCTACCATCGCCTCCCAGCCTCTGTCCCTGCGTCCGGAGGCATGTAGA |
| | | CCCGCAGCTGGTGGGGCCGTGCATACCCGGGGTCTTGACTTCGCCTGC |
| | | GATATCTACATTTGGGCCCCTCTGGCTGGTACTTGCGGGGTCCTGCTG |
| | | CTTTCACTCGTGATCACTCTTTACTGTAAGCGCGGTCGGAAGAAGCTG |
| | | CTGTACATCTTTAAGCAACCCTTCATGAGGCCTGTGCAGACTACTCAA |
| | | GAGGAGGACGGCTGTTCATGCCGGTTCCCAGAGGAGGAGGAAGGCGGC |
| | | TGCGAACTGCGCGTGAAATTCAGCCGCAGCGCAGATGCTCCAGCCTAC |
| | | AAGCAGGGGCAGAACCAGCTCTACAACGAACTCAATCTTGGTCGGAGA |
| | | GAGGAGTACGACGTGCTGGACAAGCGGAGAGGACGGGACCCAGAAATG |
| | | GGCGGGAAGCCGCGCAGAAAGAATCCCCAAGAGGGCCTGTACAACGAG |
| | | CTCCAAAAGGATAAGATGGCAGAAGCCTATAGCGAGATTGGTATGAAA |
| | | GGGGAACGCAGAAGAGGCAAAGGCCACGACGGACTGTACCAGGGACTC |
| | | AGCACCGCCACCAAGGACACCTATGACGCTCTTCACATGCAGGCCCTG |
| | | CCGCCTCGG |

139103

| | | |
|---|---|---|
| 139103-aa | 973 | QVQLVESGGGLVQPGRSLRLSCAASGFTFSNYAMSWVRQAPGKGLGWV |
| ScFv | | SGISRSGENTYYADSVKGRFTISRDNSKNTLYLQMNSLRDEDTAVYYC |
| domain | | ARSPAHYYGGMDVWGQGTTVTVSSASGGGGSGGRASGGGGSDIVLTQS |
| | | PGTLSLSPGERATLSCRASQSISSSFLAWYQQKPGQAPRLLIYGASRR |
| | | ATGIPDRFSGSGSGTDFTLTISRLEPEDSAVYYCQQYHSSPSWTFGQG |
| | | TKLEIK |
| 139103-nt | 974 | CAAGTGCAACTCGTGGAATCTGGTGGAGGACTCGTGCAACCCGGAAGA |
| ScFv | | TCGCTTAGACTGTCGTGTGCCGCCAGCGGGTTCACTTTCTCGAACTAC |
| domain | | GCGATGTCCTGGGTCCGCCAGGCACCCGGAAAGGGACTCGGTTGGGTG |
| | | TCCGGCATTTCCCGGTCCGGCGAAAATACCTACTACGCCGACTCCGTG |
| | | AAGGGCCGCTTCACCATCTCAAGGGACAACAGCAAAAACACCCTGTAC |
| | | TTGCAAATGAACTCCCTGCGGGATGAAGATACAGCCGTGTACTATTGC |
| | | GCCCGGTCGCCTGCCCATTACTACGGCGGAATGGACGTCTGGGGACAG |
| | | GGAACCACTGTGACTGTCAGCAGCGCGTCGGGTGGCGGCGGCTCAGGG |
| | | GGTCGGGCCTCCGGGGGGGGAGGGTCCGACATCGTGCTGACCCAGTCC |
| | | CCGGGAACCCTGAGCCTGAGCCCGGGAGAGCGCGCGACCCTGTCATGC |
| | | CGGGCATCCCAGAGCATTAGCTCCTCCTTTCTCGCCTGGTATCAGCAG |
| | | AAGCCCGGACAGGCCCCGAGGCTGCTGATCTACGGCGCTAGCAGAAGG |
| | | GCTACCGGAATCCCAGACCGGTTCTCCGGCTCCGGTTCCGGGACCGAT |
| | | TTCACCCTTACTATCTCGCGCCTGGAACCTGAGGACTCCGCCGTCTAC |
| | | TACTGCCAGCAGTACCACTCATCCCCGTCGTGGACGTTCGGACAGGGC |
| | | ACCAAGCTGGAGATTAAG |
| 139103-aa | 975 | QVQLVESGGGLVQPGRSLRLSCAASGFTFSNYAMSWVRQAPGKGLGWV |
| VH | | SGISRSGENTYYADSVKGRFTISRDNSKNTLYLQMNSLRDEDTAVYYC |
| | | ARSPAHYYGGMDVWGQGTTVTVSS |
| 139103-aa | 976 | DIVLTQSPGTLSLSPGERATLSCRASQSISSSFLAWYQQKPGQAPRLL |
| VL | | IYGASRRATGIPDRFSGSGSGTDFTLTISRLEPEDSAVYYCQQYHSSP |
| | | SWTFGQGTKLEIK |
| 139103-aa | 977 | MALPVTALLLPLALLLHAARPQVQLVESGGGLVQPGRSLRLSCAASGF |
| Full CAR | | TFSNYAMSWVRQAPGKGLGWVSGISRSGENTYYADSVKGRFTISRDNS |
| | | KNTLYLQMNSLRDEDTAVYYCARSPAHYYGGMDVWGQGTTVTVSSASG |
| | | GGGSGGRASGGGGSDIVLTQSPGTLSLSPGERATLSCRASQSISSSEL |
| | | AWYQQKPGQAPRLLIYGASRRATGIPDRFSGSGSGTDETLTISRLEPE |
| | | DSAVYYCQQYHSSPSWTFGQGTKLEIKTTTPAPRPPTPAPTIASQPLS |
| | | LRPEACRPAAGGAVHTRGLDFACDIYIWAPLAGTCGVLLLSLVITLYC |
| | | KRGRKKLLYIFKQPFMRPVQTTQEEDGCSCRFPEEEEGGCELRVKFSR |
| | | SADAPAYKQGQNQLYNELNLGRREEYDVLDKRRGRDPEMGGKPRRKNP |
| | | QEGLYNELQKDKMAEAYSEIGMKGERRRGKGHDGLYQGLSTATKDTYD |
| | | ALHMQALPPR |
| 139103-nt | 978 | ATGGCCCTCCCTGTCACCGCCCTGCTGCTTCCGCTGGCTCTTCTGCTC |
| Full CAR | | CACGCCGCTCGGCCCCAAGTGCAACTCGTGGAATCTGGTGGAGGACTC |
| | | GTGCAACCCGGAAGATCGCTTAGACTGTCGTGTGCCGCCAGCGGGTTC |
| | | ACTTTCTCGAACTACGCGATGTCCTGGGTCCGCCAGGCACCCGGAAAG |
| | | GGACTCGGTTGGGTGTCCGGCATTTCCCGGTCCGGCGAAAATACCTAC |
| | | TACGCCGACTCCGTGAAGGGCCGCTTCACCATCTCAAGGGACAACAGC |
| | | AAAAACACCCTGTACTTGCAAATGAACTCCCTGCGGGATGAAGATACA |
| | | GCCGTGTACTATTGCGCCCGGTCGCCTGCCCATTACTACGGCGGAATG |
| | | GACGTCTGGGGACAGGGAACCACTGTGACTGTCAGCAGCGCGTCGGGT |
| | | GGCGGCGGCTCAGGGGGTCGGGCCTCCGGGGGGGGAGGGTCCGACATC |
| | | GTGCTGACCCAGTCCCCGGGAACCCTGAGCCTGAGCCCGGGAGAGCGC |
| | | GCGACCCTGTCATGCCGGGCATCCCAGAGCATTAGCTCCTCCTTTCTC |
| | | GCCTGGTATCAGCAGAAGCCCGGACAGGCCCCGAGGCTGCTGATCTAC |
| | | GGCGCTAGCAGAAGGGCTACCGGAATCCCAGACCGGTTCTCCGGCTCC |
| | | GGTTCCGGGACCGATTTCACCCTTACTATCTCGCGCCTGGAACCTGAG |
| | | GACTCCGCCGTCTACTACTGCCAGCAGTACCACTCATCCCCGTCGTGG |
| | | ACGTTCGGACAGGGCACCAAGCTGGAGATTAAGACCACTACCCCAGCA |
| | | CCGAGGCCACCCACCCCGGCTCCTACCATCGCCTCCCAGCCTCTGTCC |
| | | CTGCGTCCGGAGGCATGTAGACCCGCAGCTGGTGGGGCCGTGCATACC |
| | | CGGGGTCTTGACTTCGCCTGCGATATCTACATTTGGGCCCCTCTGGCT |
| | | GGTACTTGCGGGGTCCTGCTGCTTTCACTCGTGATCACTCTTTACTGT |
| | | AAGCGCGGTCGGAAGAAGCTGCTGTACATCTTTAAGCAACCCTTCATG |
| | | AGGCCTGTGCAGACTACTCAAGAGGAGGACGGCTGTTCATGCCGGTTC |
| | | CCAGAGGAGGAGGAAGGCGGCTGCGAACTGCGCGTGAAATTCAGCCGC |
| | | AGCGCAGATGCTCCAGCCTACAAGCAGGGGCAGAACCAGCTCTACAAC |
| | | GAACTCAATCTTGGTCGGAGAGAGGAGTACGACGTGCTGGACAAGCGG |
| | | AGAGGACGGGACCCAGAAATGGGCGGGAAGCCGCGCAGAAAGAATCCC |
| | | CAAGAGGGCCTGTACAACGAGCTCCAAAAGGATAAGATGGCAGAAGCC |
| | | TATAGCGAGATTGGTATGAAAGGGGAACGCAGAAGAGGCAAAGGCCAC |
| | | GACGGACTGTACCAGGGACTCAGCACCGCCACCAAGGACACCTATGAC |
| | | GCTCTTCACATGCAGGCCCTGCCGCCTCGG |

139105

| | | |
|---|---|---|
| 139105-aa | 979 | QVQLVESGGGLVQPGRSLRLSCAASGFTFDDYAMHWVRQAPGKGLEWV |
| ScFv | | SGISWNSGSIGYADSVKGRFTISRDNAKNSLYLQMNSLRAEDTALYYC |
| domain | | SVHSFLAYWGQGTLVTVSSASGGGGSGGRASGGGGSDIVMTQTPLSLP |
| | | VTPGEPASISCRSSQSLLHSNGYNYLDWYLQKPGQSPQLLIYLGSNRA |
| | | SGVPDRFSGSGSGTDFTLKISRVEAEDVGVYYCMQALQTPYTFGQGTK |
| | | VEIK |
| 139105-nt | 980 | CAAGTGCAACTCGTCGAATCCGGTGGAGGTCTGGTCCAACCTGGTAGA |
| ScFv | | AGCCTGAGACTGTCGTGTGCGGCCAGCGGATTCACCTTTGATGACTAT |
| domain | | GCTATGCACTGGGTGCGGCAGGCCCCAGGAAAGGGCCTGGAATGGGTG |
| | | TCGGGAATTAGCTGGAACTCCGGGTCCATTGGCTACGCCGACTCCGTG |
| | | AAGGGCCGCTTCACCATCTCCCGCGACAACGCAAAGAACTCCCTGTAC |
| | | TTGCAAATGAACTCGCTCAGGGCTGAGGATACCGCGCTGTACTACTGC |
| | | TCCGTGCATTCCTTCCTGGCCTACTGGGGACAGGGAACTCTGGTCACC |
| | | GTGTCGAGCGCCTCCGGCGGCGGGGGCTCGGGTGGACGGGCCTCGGGC |
| | | GGAGGGGGGTCCGACATCGTGATGACCCAGACCCCGCTGAGCTTGCCC |
| | | GTGACTCCCGGAGAGCCTGCATCCATCTCCTGCCGGTCATCCCAGTCC |
| | | CTTCTCCACTCCAACGGATACAACTACCTCGACTGGTACCTCCAGAAG |
| | | CCGGGACAGAGCCCTCAGCTTCTGATCTACCTGGGGTCAAATAGAGCC |
| | | TCAGGAGTGCCGGATCGGTTCAGCGGATCTGGTTCGGGAACTGATTTC |
| | | ACTCTGAAGATTTCCCGCGTGGAAGCCGAGGACGTGGGCGTCTACTAC |
| | | TGTATGCAGGCGCTGCAGACCCCCTATACCTTCGGCCAAGGGACGAAA |
| | | GTGGAGATCAAG |
| 139105-aa | 981 | QVQLVESGGGLVQPGRSLRLSCAASGFTFDDYAMHWVRQAPGKGLEWV |
| VH | | SGISWNSGSIGYADSVKGRFTISRDNAKNSLYLQMNSLRAEDTALYYC |
| | | SVHSFLAYWGQGTLVTVSS |
| 139105-aa | 982 | DIVMTQTPLSLPVTPGEPASISCRSSQSLLHSNGYNYLDWYLQKPGQS |
| VL | | PQLLIYLGSNRASGVPDRFSGSGSGTDFTLKISRVEAEDVGVYYCMQA |
| | | LQTPYTFGQGTKVEIK |
| 139105-aa | 983 | MALPVTALLLPLALLLHAARPQVQLVESGGGLVQPGRSLRLSCAASGF |
| Full CAR | | TEDDYAMHWVRQAPGKGLEWVSGISWNSGSIGYADSVKGRFTISRDNA |
| | | KNSLYLQMNSLRAEDTALYYCSVHSFLAYWGQGTLVTVSSASGGGGSG |
| | | GRASGGGGSDIVMTQTPLSLPVTPGEPASISCRSSQSLLHSNGYNYLD |
| | | WYLQKPGQSPQLLIYLGSNRASGVPDRFSGSGSGTDFTLKISRVEAED |
| | | VGVYYCMQALQTPYTFGQGTKVEIKTTTPAPRPPTPAPTIASQPLSLR |
| | | PEACRPAAGGAVHTRGLDFACDIYIWAPLAGTCGVLLLSLVITLYCKR |
| | | GRKKLLYIFKQPFMRPVQTTQEEDGCSCRFPEEEEGGCELRVKFSRSA |
| | | DAPAYKQGQNQLYNELNLGRREEYDVLDKRRGRDPEMGGKPRRKNPQE |
| | | GLYNELQKDKMAEAYSEIGMKGERRRGKGHDGLYQGLSTATKDTYDAL |
| | | HMQALPPR |
| 139105-nt | 984 | ATGGCCCTCCCTGTCACCGCCCTGCTGCTTCCGCTGGCTCTTCTGCTC |
| Full CAR | | CACGCCGCTCGGCCCCAAGTGCAACTCGTCGAATCCGGTGGAGGTCTG |
| | | GTCCAACCTGGTAGAAGCCTGAGACTGTCGTGTGCGGCCAGCGGATTC |
| | | ACCTTTGATGACTATGCTATGCACTGGGTGCGGCAGGCCCCAGGAAAG |
| | | GGCCTGGAATGGGTGTCGGGAATTAGCTGGAACTCCGGGTCCATTGGC |
| | | TACGCCGACTCCGTGAAGGGCCGCTTCACCATCTCCCGCGACAACGCA |
| | | AAGAACTCCCTGTACTTGCAAATGAACTCGCTCAGGGCTGAGGATACC |
| | | GCGCTGTACTACTGCTCCGTGCATTCCTTCCTGGCCTACTGGGGACAG |
| | | GGAACTCTGGTCACCGTGTCGAGCGCCTCCGGCGGCGGGGGCTCGGGT |
| | | GGACGGGCCTCGGGCGGAGGGGGGTCCGACATCGTGATGACCCAGACC |
| | | CCGCTGAGCTTGCCCGTGACTCCCGGAGAGCCTGCATCCATCTCCTGC |
| | | CGGTCATCCCAGTCCCTTCTCCACTCCAACGGATACAACTACCTCGAC |
| | | TGGTACCTCCAGAAGCCGGGACAGAGCCCTCAGCTTCTGATCTACCTG |
| | | GGGTCAAATAGAGCCTCAGGAGTGCCGGATCGGTTCAGCGGATCTGGT |
| | | TCGGGAACTGATTTCACTCTGAAGATTTCCCGCGTGGAAGCCGAGGAC |
| | | GTGGGCGTCTACTACTGTATGCAGGCGCTGCAGACCCCCTATACCTTC |
| | | GGCCAAGGGACGAAAGTGGAGATCAAGACCACTACCCCAGCACCGAGG |
| | | CCACCCACCCCGGCTCCTACCATCGCCTCCCAGCCTCTGTCCCTGCGT |
| | | CCGGAGGCATGTAGACCCGCAGCTGGTGGGGCCGTGCATACCCGGGGT |
| | | CTTGACTTCGCCTGCGATATCTACATTTGGGCCCCTCTGGCTGGTACT |
| | | TGCGGGGTCCTGCTGCTTTCACTCGTGATCACTCTTTACTGTAAGCGC |
| | | GGTCGGAAGAAGCTGCTGTACATCTTTAAGCAACCCTTCATGAGGCCT |
| | | GTGCAGACTACTCAAGAGGAGGACGGCTGTTCATGCCGGTTCCCAGAG |
| | | GAGGAGGAAGGCGGCTGCGAACTGCGCGTGAAATTCAGCCGCAGCGCA |
| | | GATGCTCCAGCCTACAAGCAGGGGCAGAACCAGCTCTACAACGAACTC |
| | | AATCTTGGTCGGAGAGAGGAGTACGACGTGCTGGACAAGCGGAGAGGA |
| | | CGGGACCCAGAAATGGGCGGGAAGCCGCGCAGAAAGAATCCCCAAGAG |
| | | GGCCTGTACAACGAGCTCCAAAAGGATAAGATGGCAGAAGCCTATAGC |
| | | GAGATTGGTATGAAAGGGGAACGCAGAAGAGGCAAAGGCCACGACGGA |
| | | CTGTACCAGGGACTCAGCACCGCCACCAAGGACACCTATGACGCTCTT |
| | | CACATGCAGGCCCTGCCGCCTCGG |

139111

| | | |
|---|---|---|
| 139111-aa | 985 | EVQLLESGGGLVQPGGSLRLSCAVSGFALSNHGMSWVRRAPGKGLEWV |
| ScFv | | SGIVYSGSTYYAASVKGRFTISRDNSRNTLYLQMNSLRPEDTAIYYCS |
| domain | | AHGGESDVWGQGTTVTVSSASGGGGSGGRASGGGGSDIVMTQTPLSLS |
| | | VTPGQPASISCKSSQSLLRNDGKTPLYWYLQKAGQPPQLLIYEVSNRF |
| | | SGVPDRFSGSGSGTDFTLKISRVEAEDVGAYYCMQNIQFPSFGGGTKL |
| | | EIK |
| 139111-nt | 986 | GAAGTGCAATTGTTGGAATCTGGAGGAGGACTTGTGCAGCCTGGAGGA |
| ScFv | | TCACTGAGACTTTCGTGTGCGGTGTCAGGCTTCGCCCTGAGCAACCAC |
| domain | | GGCATGAGCTGGGTGCGGAGAGCCCCGGGGAAGGGTCTGGAATGGGTG |
| | | TCCGGGATCGTCTACTCCGGTTCAACTTACTACGCCGCAAGCGTGAAG |
| | | GGTCGCTTCACCATTTCCCGCGATAACTCCCGGAACACCCTGTACCTC |
| | | CAAATGAACTCCCTGCGGCCCGAGGACACCGCCATCTACTACTGTTCC |
| | | GCGCATGGAGGAGAGTCCGATGTCTGGGGACAGGGCACTACCGTGACC |
| | | GTGTCGAGCGCCTCGGGGGGAGGAGGCTCCGGCGGTCGCGCCTCCGGG |
| | | GGGGGTGGCAGCGACATTGTGATGACGCAGACTCCACTCTCGCTGTCC |
| | | GTGACCCCGGGACAGCCCGCGTCCATCTCGTGCAAGAGCTCCCAGAGC |
| | | CTGCTGAGGAACGACGGAAAGACTCCTCTGTATTGGTACCTCCAGAAG |
| | | GCTGGACAGCCCCCGCAACTGCTCATCTACGAAGTGTCAAATCGCTTC |
| | | TCCGGGGTGCCGGATCGGTTTTCCGGCTCGGGATCGGGCACCGACTTC |
| | | ACCCTGAAAATCTCCAGGGTCGAGGCCGAGGACGTGGGAGCCTACTAC |
| | | TGCATGCAAAACATCCAGTTCCCTTCCTTCGGCGGCGGCACAAAGCTG |
| | | GAGATTAAG |
| 139111-aa | 987 | EVQLLESGGGLVQPGGSLRLSCAVSGFALSNHGMSWVRRAPGKGLEWV |
| VH | | SGIVYSGSTYYAASVKGRFTISRDNSRNTLYLQMNSLRPEDTAIYYCS |
| | | AHGGESDVWGQGTTVTVSS |
| 139111-aa | 988 | DIVMTQTPLSLSVTPGQPASISCKSSQSLLRNDGKTPLYWYLQKAGQP |
| VL | | PQLLIYEVSNRFSGVPDRFSGSGSGTDFTLKISRVEAEDVGAYYCMQN |
| | | IQFPSFGGGTKLEIK |
| 139111-aa | 989 | MALPVTALLLPLALLLHAARPEVQLLESGGGLVQPGGSLRLSCAVSGF |
| Full CAR | | ALSNHGMSWVRRAPGKGLEWVSGIVYSGSTYYAASVKGRFTISRDNSR |
| | | NTLYLQMNSLRPEDTAIYYCSAHGGESDVWGQGTTVTVSSASGGGGSG |
| | | GRASGGGGSDIVMTQTPLSLSVTPGQPASISCKSSQSLLRNDGKTPLY |
| | | WYLQKAGQPPQLLIYEVSNRFSGVPDRFSGSGSGTDETLKISRVEAED |
| | | VGAYYCMQNIQFPSFGGGTKLEIKTTTPAPRPPTPAPTIASQPLSLRP |
| | | EACRPAAGGAVHTRGLDFACDIYIWAPLAGTCGVLLLSLVITLYCKRG |
| | | RKKLLYIFKQPFMRPVQTTQEEDGCSCRFPEEEEGGCELRVKFSRSAD |
| | | APAYKQGQNQLYNELNLGRREEYDVLDKRRGRDPEMGGKPRRKNPQEG |
| | | LYNELQKDKMAEAYSEIGMKGERRRGKGHDGLYQGLSTATKDTYDALH |
| | | MQALPPR |
| 139111-nt | 990 | ATGGCCCTCCCTGTCACCGCCCTGCTGCTTCCGCTGGCTCTTCTGCTC |
| Full CAR | | CACGCCGCTCGGCCCGAAGTGCAATTGTTGGAATCTGGAGGAGGACTT |
| | | GTGCAGCCTGGAGGATCACTGAGACTTTCGTGTGCGGTGTCAGGCTTC |
| | | GCCCTGAGCAACCACGGCATGAGCTGGGTGCGGAGAGCCCCGGGGAAG |
| | | GGTCTGGAATGGGTGTCCGGGATCGTCTACTCCGGTTCAACTTACTAC |
| | | GCCGCAAGCGTGAAGGGTCGCTTCACCATTTCCCGCGATAACTCCCGG |
| | | AACACCCTGTACCTCCAAATGAACTCCCTGCGGCCCGAGGACACCGCC |
| | | ATCTACTACTGTTCCGCGCATGGAGGAGAGTCCGATGTCTGGGGACAG |
| | | GGCACTACCGTGACCGTGTCGAGCGCCTCGGGGGGAGGAGGCTCCGGC |
| | | GGTCGCGCCTCCGGGGGGGGTGGCAGCGACATTGTGATGACGCAGACT |
| | | CCACTCTCGCTGTCCGTGACCCCGGGACAGCCCGCGTCCATCTCGTGC |
| | | AAGAGCTCCCAGAGCCTGCTGAGGAACGACGGAAAGACTCCTCTGTAT |
| | | TGGTACCTCCAGAAGGCTGGACAGCCCCCGCAACTGCTCATCTACGAA |
| | | GTGTCAAATCGCTTCTCCGGGGTGCCGGATCGGTTTTCCGGCTCGGGA |
| | | TCGGGCACCGACTTCACCCTGAAAATCTCCAGGGTCGAGGCCGAGGAC |
| | | GTGGGAGCCTACTACTGCATGCAAAACATCCAGTTCCCTTCCTTCGGC |
| | | GGCGGCACAAAGCTGGAGATTAAGACCACTACCCCAGCACCGAGGCCA |
| | | CCCACCCCGGCTCCTACCATCGCCTCCCAGCCTCTGTCCCTGCGTCCG |
| | | GAGGCATGTAGACCCGCAGCTGGTGGGGCCGTGCATACCCGGGGTCTT |
| | | GACTTCGCCTGCGATATCTACATTTGGGCCCCTCTGGCTGGTACTTGC |
| | | GGGGTCCTGCTGCTTTCACTCGTGATCACTCTTTACTGTAAGCGCGGT |
| | | CGGAAGAAGCTGCTGTACATCTTTAAGCAACCCTTCATGAGGCCTGTG |
| | | CAGACTACTCAAGAGGAGGACGGCTGTTCATGCCGGTTCCCAGAGGAG |
| | | GAGGAAGGCGGCTGCGAACTGCGCGTGAAATTCAGCCGCAGCGCAGAT |
| | | GCTCCAGCCTACAAGCAGGGGCAGAACCAGCTCTACAACGAACTCAAT |
| | | CTTGGTCGGAGAGAGGAGTACGACGTGCTGGACAAGCGGAGAGGACGG |
| | | GACCCAGAAATGGGCGGGAAGCCGCGCAGAAAGAATCCCCAAGAGGGC |
| | | CTGTACAACGAGCTCCAAAAGGATAAGATGGCAGAAGCCTATAGCGAG |
| | | ATTGGTATGAAAGGGGAACGCAGAAGAGGCAAAGGCCACGACGGACTG |
| | | TACCAGGGACTCAGCACCGCCACCAAGGACACCTATGACGCTCTTCAC |
| | | ATGCAGGCCCTGCCGCCTCGG |

139100

| | | |
|---|---|---|
| 139100-aa | 991 | QVQLVQSGAEVRKTGASVKVSCKASGYIFDNFGINWVRQAPGQGLEWM |
| ScFv | | GWINPKNNNTNYAQKFQGRVTITADESTNTAYMEVSSLRSEDTAVYYC |
| domain | | ARGPYYYQSYMDVWGQGTMVTVSSASGGGGSGGRASGGGGSDIVMTQT |
| | | PLSLPVTPGEPASISCRSSQSLLHSNGYNYLNWYLQKPGQSPQLLIYL |
| | | GSKRASGVPDRFSGSGSGTDFTLHITRVGAEDVGVYYCMQALQTPYTF |
| | | GQGTKLEIK |
| 139100-nt | 992 | CAAGTCCAACTCGTCCAGTCCGGCGCAGAAGTCAGAAAAACCGGTGCT |
| ScFv | | AGCGTGAAAGTGTCCTGCAAGGCCTCCGGCTACATTTTCGATAACTTC |
| domain | | GGAATCAACTGGGTCAGACAGGCCCCGGGCCAGGGGCTGGAATGGATG |
| | | GGATGGATCAACCCCAAGAACAACAACACCAACTACGCACAGAAGTTC |
| | | CAGGGCCGCGTGACTATCACCGCCGATGAATCGACCAATACCGCCTAC |
| | | ATGGAGGTGTCCTCCCTGCGGTCGGAGGACACTGCCGTGTATTACTGC |
| | | GCGAGGGGCCCATACTACTACCAAAGCTACATGGACGTCTGGGGACAG |
| | | GGAACCATGGTGACCGTGTCATCCGCCTCCGGTGGTGGAGGCTCCGGG |
| | | GGGCGGGCTTCAGGAGGCGGAGGAAGCGATATTGTGATGACCCAGACT |
| | | CCGCTTAGCCTGCCCGTGACTCCTGGAGAACCGGCCTCCATTTCCTGC |
| | | CGGTCCTCGCAATCACTCCTGCATTCCAACGGTTACAACTACCTGAAT |
| | | TGGTACCTCCAGAAGCCTGGCCAGTCGCCCCAGTTGCTGATCTATCTG |
| | | GGCTCGAAGCGCGCCTCCGGGGTGCCTGACCGGTTTAGCGGATCTGGG |
| | | AGCGGCACGGACTTCACTCTCCACATCACCCGCGTGGGAGCGGAGGAC |
| | | GTGGGAGTGTACTACTGTATGCAGGCGCTGCAGACTCCGTACACATTC |
| | | GGACAGGGCACCAAGCTGGAGATCAAG |
| 139100-aa | 993 | QVQLVQSGAEVRKTGASVKVSCKASGYIFDNFGINWVRQAPGQGLEWM |
| VH | | GWINPKNNNTNYAQKFQGRVTITADESTNTAYMEVSSLRSEDTAVYYC |
| | | ARGPYYYQSYMDVWGQGTMVTVSS |
| 139100-aa | 994 | DIVMTQTPLSLPVTPGEPASISCRSSQSLLHSNGYNYLNWYLQKPGQS |
| VL | | PQLLIYLGSKRASGVPDRFSGSGSGTDFTLHITRVGAEDVGVYYCMQA |
| | | LQTPYTFGQGTKLEIK |
| 139100-aa | 995 | MALPVTALLLPLALLLHAARPQVQLVQSGAEVRKTGASVKVSCKASGY |
| Full CAR | | IFDNFGINWVRQAPGQGLEWMGWINPKNNNTNYAQKFQGRVTITADES |
| | | TNTAYMEVSSLRSEDTAVYYCARGPYYYQSYMDVWGQGTMVTVSSASG |
| | | GGGSGGRASGGGGSDIVMTQTPLSLPVTPGEPASISCRSSQSLLHSNG |
| | | YNYLNWYLQKPGQSPQLLIYLGSKRASGVPDRFSGSGSGTDFTLHITR |
| | | VGAEDVGVYYCMQALQTPYTFGQGTKLEIKTTTPAPRPPTPAPTIASQ |
| | | PLSLRPEACRPAAGGAVHTRGLDFACDIYIWAPLAGTCGVLLLSLVIT |
| | | LYCKRGRKKLLYIFKQPFMRPVQTTQEEDGCSCRFPEEEEGGCELRVK |
| | | FSRSADAPAYKQGQNQLYNELNLGRREEYDVLDKRRGRDPEMGGKPRR |
| | | KNPQEGLYNELQKDKMAEAYSEIGMKGERRRGKGHDGLYQGLSTATKD |
| | | TYDALHMQALPPR |
| 139100-nt | 996 | ATGGCCCTCCCTGTCACCGCCCTGCTGCTTCCGCTGGCTCTTCTGCTC |
| Full CAR | | CACGCCGCTCGGCCCCAAGTCCAACTCGTCCAGTCCGGCGCAGAAGTC |
| | | AGAAAAACCGGTGCTAGCGTGAAAGTGTCCTGCAAGGCCTCCGGCTAC |
| | | ATTTTCGATAACTTCGGAATCAACTGGGTCAGACAGGCCCCGGGCCAG |
| | | GGGCTGGAATGGATGGGATGGATCAACCCCAAGAACAACAACACCAAC |
| | | TACGCACAGAAGTTCCAGGGCCGCGTGACTATCACCGCCGATGAATCG |
| | | ACCAATACCGCCTACATGGAGGTGTCCTCCCTGCGGTCGGAGGACACT |
| | | GCCGTGTATTACTGCGCGAGGGGCCCATACTACTACCAAAGCTACATG |
| | | GACGTCTGGGGACAGGGAACCATGGTGACCGTGTCATCCGCCTCCGGT |
| | | GGTGGAGGCTCCGGGGGGCGGGCTTCAGGAGGCGGAGGAAGCGATATT |
| | | GTGATGACCCAGACTCCGCTTAGCCTGCCCGTGACTCCTGGAGAACCG |
| | | GCCTCCATTTCCTGCCGGTCCTCGCAATCACTCCTGCATTCCAACGGT |
| | | TACAACTACCTGAATTGGTACCTCCAGAAGCCTGGCCAGTCGCCCCAG |
| | | TTGCTGATCTATCTGGGCTCGAAGCGCGCCTCCGGGGTGCCTGACCGG |
| | | TTTAGCGGATCTGGGAGCGGCACGGACTTCACTCTCCACATCACCCGC |
| | | GTGGGAGCGGAGGACGTGGGAGTGTACTACTGTATGCAGGCGCTGCAG |
| | | ACTCCGTACACATTCGGACAGGGCACCAAGCTGGAGATCAAGACCACT |
| | | ACCCCAGCACCGAGGCCACCCACCCCGGCTCCTACCATCGCCTCCCAG |
| | | CCTCTGTCCCTGCGTCCGGAGGCATGTAGACCCGCAGCTGGTGGGGCC |
| | | GTGCATACCCGGGGTCTTGACTTCGCCTGCGATATCTACATTTGGGCC |
| | | CCTCTGGCTGGTACTTGCGGGGTCCTGCTGCTTTCACTCGTGATCACT |
| | | CTTTACTGTAAGCGCGGTCGGAAGAAGCTGCTGTACATCTTTAAGCAA |
| | | CCCTTCATGAGGCCTGTGCAGACTACTCAAGAGGAGGACGGCTGTTCA |
| | | TGCCGGTTCCCAGAGGAGGAGGAAGGCGGCTGCGAACTGCGCGTGAAA |
| | | TTCAGCCGCAGCGCAGATGCTCCAGCCTACAAGCAGGGGCAGAACCAG |
| | | CTCTACAACGAACTCAATCTTGGTCGGAGAGAGGAGTACGACGTGCTG |
| | | GACAAGCGGAGAGGACGGGACCCAGAAATGGGCGGGAAGCCGCGCAGA |
| | | AAGAATCCCCAAGAGGGCCTGTACAACGAGCTCCAAAAGGATAAGATG |
| | | GCAGAAGCCTATAGCGAGATTGGTATGAAAGGGGAACGCAGAAGAGGC |
| | | AAAGGCCACGACGGACTGTACCAGGGACTCAGCACCGCCACCAAGGAC |
| | | ACCTATGACGCTCTTCACATGCAGGCCCTGCCGCCTCGG |

139101

| | | |
|---|---|---|
| 139101-aa | 997 | QVQLQESGGGLVQPGGSLRLSCAASGFTFSSDAMTWVRQAPGKGLEWV |
| ScFv | | SVISGSGGTTYYADSVKGRFTISRDNSKNTLYLQMNSLRAEDTAVYYC |
| domain | | AKLDSSGYYYARGPRYWGQGTLVTVSSASGGGGSGGRASGGGGSDIQL |
| | | TQSPSSLSASVGDRVTITCRASQSISSYLNWYQQKPGKAPKLLIYGAS |
| | | TLASGVPARFSGSGSGTHFTLTINSLQSEDSATYYCQQSYKRASFGQG |
| | | TKVEIK |
| 139101-nt | 998 | CAAGTGCAACTTCAAGAATCAGGCGGAGGACTCGTGCAGCCCGGAGGA |
| ScFv | | TCATTGCGGCTCTCGTGCGCCGCCTCGGGCTTCACCTTCTCGAGCGAC |
| domain | | GCCATGACCTGGGTCCGCCAGGCCCCGGGGAAGGGGCTGGAATGGGTG |
| | | TCTGTGATTTCCGGCTCCGGGGGAACTACGTACTACGCCGATTCCGTG |
| | | AAAGGTCGCTTCACTATCTCCCGGGACAACAGCAAGAACACCCTTTAT |
| | | CTGCAAATGAATTCCCTCCGCGCCGAGGACACCGCCGTGTACTACTGC |
| | | GCCAAGCTGGACTCCTCGGGCTACTACTATGCCCGGGGTCCGAGATAC |
| | | TGGGGACAGGGAACCCTCGTGACCGTGTCCTCCGCGTCCGGCGGAGGA |
| | | GGGTCGGGAGGGCGGGCCTCCGGCGGCGGCGGTTCGGACATCCAGCTG |
| | | ACCCAGTCCCCATCCTCACTGAGCGCAAGCGTGGGCGACAGAGTCACC |
| | | ATTACATGCAGGGCGTCCCAGAGCATCAGCTCCTACCTGAACTGGTAC |
| | | CAACAGAAGCCTGGAAAGGCTCCTAAGCTGTTGATCTACGGGGCTTCG |
| | | ACCCTGGCATCCGGGGTGCCCGCGAGGTTTAGCGGAAGCGGTAGCGGC |
| | | ACTCACTTCACTCTGACCATTAACAGCCTCCAGTCCGAGGATTCAGCC |
| | | ACTTACTACTGTCAGCAGTCCTACAAGCGGGCCAGCTTCGGACAGGGC |
| | | ACTAAGGTCGAGATCAAG |
| 139101-aa | 999 | QVQLQESGGGLVQPGGSLRLSCAASGFTFSSDAMTWVRQAPGKGLEWV |
| VH | | SVISGSGGTTYYADSVKGRFTISRDNSKNTLYLQMNSLRAEDTAVYYC |
| | | AKLDSSGYYYARGPRYWGQGTLVTVSS |
| 139101-aa | 1000 | DIQLTQSPSSLSASVGDRVTITCRASQSISSYLNWYQQKPGKAPKLLI |
| VL | | YGASTLASGVPARFSGSGSGTHFTLTINSLQSEDSATYYCQQSYKRAS |
| | | FGQGTKVEIK |
| 139101-aa | 1001 | MALPVTALLLPLALLLHAARPQVQLQESGGGLVQPGGSLRLSCAASGF |
| Full CAR | | TESSDAMTWVRQAPGKGLEWVSVISGSGGTTYYADSVKGRFTISRDNS |
| | | KNTLYLQMNSLRAEDTAVYYCAKLDSSGYYYARGPRYWGQGTLVTVSS |
| | | ASGGGGSGGRASGGGGSDIQLTQSPSSLSASVGDRVTITCRASQSISS |
| | | YLNWYQQKPGKAPKLLIYGASTLASGVPARFSGSGSGTHFTLTINSLQ |
| | | SEDSATYYCQQSYKRASFGQGTKVEIKTTTPAPRPPTPAPTIASQPLS |
| | | LRPEACRPAAGGAVHTRGLDFACDIYIWAPLAGTCGVLLLSLVITLYC |
| | | KRGRKKLLYIFKQPFMRPVQTTQEEDGCSCRFPEEEEGGCELRVKFSR |
| | | SADAPAYKQGQNQLYNELNLGRREEYDVLDKRRGRDPEMGGKPRRKNP |
| | | QEGLYNELQKDKMAEAYSEIGMKGERRRGKGHDGLYQGLSTATKDTYD |
| | | ALHMQALPPR |
| 139101-nt | 1002 | ATGGCCCTCCCTGTCACCGCCCTGCTGCTTCCGCTGGCTCTTCTGCTC |
| Full CAR | | CACGCCGCTCGGCCCCAAGTGCAACTTCAAGAATCAGGCGGAGGACTC |
| | | GTGCAGCCCGGAGGATCATTGCGGCTCTCGTGCGCCGCCTCGGGCTTC |
| | | ACCTTCTCGAGCGACGCCATGACCTGGGTCCGCCAGGCCCCGGGGAAG |
| | | GGGCTGGAATGGGTGTCTGTGATTTCCGGCTCCGGGGGAACTACGTAC |
| | | TACGCCGATTCCGTGAAAGGTCGCTTCACTATCTCCCGGGACAACAGC |
| | | AAGAACACCCTTTATCTGCAAATGAATTCCCTCCGCGCCGAGGACACC |
| | | GCCGTGTACTACTGCGCCAAGCTGGACTCCTCGGGCTACTACTATGCC |
| | | CGGGGTCCGAGATACTGGGGACAGGGAACCCTCGTGACCGTGTCCTCC |
| | | GCGTCCGGCGGAGGAGGGTCGGGAGGGCGGGCCTCCGGCGGCGGCGGT |
| | | TCGGACATCCAGCTGACCCAGTCCCCATCCTCACTGAGCGCAAGCGTG |
| | | GGCGACAGAGTCACCATTACATGCAGGGCGTCCCAGAGCATCAGCTCC |
| | | TACCTGAACTGGTACCAACAGAAGCCTGGAAAGGCTCCTAAGCTGTTG |
| | | ATCTACGGGGCTTCGACCCTGGCATCCGGGGTGCCCGCGAGGTTTAGC |
| | | GGAAGCGGTAGCGGCACTCACTTCACTCTGACCATTAACAGCCTCCAG |
| | | TCCGAGGATTCAGCCACTTACTACTGTCAGCAGTCCTACAAGCGGGCC |
| | | AGCTTCGGACAGGGCACTAAGGTCGAGATCAAGACCACTACCCCAGCA |
| | | CCGAGGCCACCCACCCCGGCTCCTACCATCGCCTCCCAGCCTCTGTCC |
| | | CTGCGTCCGGAGGCATGTAGACCCGCAGCTGGTGGGGCCGTGCATACC |
| | | CGGGGTCTTGACTTCGCCTGCGATATCTACATTTGGGCCCCTCTGGCT |
| | | GGTACTTGCGGGGTCCTGCTGCTTTCACTCGTGATCACTCTTTACTGT |
| | | AAGCGCGGTCGGAAGAAGCTGCTGTACATCTTTAAGCAACCCTTCATG |
| | | AGGCCTGTGCAGACTACTCAAGAGGAGGACGGCTGTTCATGCCGGTTC |
| | | CCAGAGGAGGAGGAAGGCGGCTGCGAACTGCGCGTGAAATTCAGCCGC |
| | | AGCGCAGATGCTCCAGCCTACAAGCAGGGGCAGAACCAGCTCTACAAC |
| | | GAACTCAATCTTGGTCGGAGAGAGGAGTACGACGTGCTGGACAAGCGG |
| | | AGAGGACGGGACCCAGAAATGGGCGGGAAGCCGCGCAGAAAGAATCCC |
| | | CAAGAGGGCCTGTACAACGAGCTCCAAAAGGATAAGATGGCAGAAGCC |
| | | TATAGCGAGATTGGTATGAAAGGGGAACGCAGAAGAGGCAAAGGCCAC |
| | | GACGGACTGTACCAGGGACTCAGCACCGCCACCAAGGACACCTATGAC |
| | | GCTCTTCACATGCAGGCCCTGCCGCCTCGG |

139102

| | | |
|---|---|---|
| 139102-aa | 1003 | QVQLVQSGAEVKKPGASVKVSCKASGYTFSNYGITWVRQAPGQGLEWM |
| ScFv | | GWISAYNGNTNYAQKFQGRVTMTRNTSISTAYMELSSLRSEDTAVYYC |
| domain | | ARGPYYYYMDVWGKGTMVTVSSASGGGGSGGRASGGGGSEIVMTQSPL |
| | | SLPVTPGEPASISCRSSQSLLYSNGYNYVDWYLQKPGQSPQLLIYLGS |
| | | NRASGVPDRFSGSGSGTDFKLQISRVEAEDVGIYYCMQGRQFPYSFGQ |
| | | GTKVEIK |
| 139102-nt | 1004 | CAAGTCCAACTGGTCCAGAGCGGTGCAGAAGTGAAGAAGCCCGGAGCG |
| ScFv | | AGCGTGAAAGTGTCCTGCAAGGCTTCCGGGTACACCTTCTCCAACTAC |
| domain | | GGCATCACTTGGGTGCGCCAGGCCCCGGGACAGGGCCTGGAATGGATG |
| | | GGGTGGATTTCCGCGTACAACGGCAATACGAACTACGCTCAGAAGTTC |
| | | CAGGGTAGAGTGACCATGACTAGGAACACCTCCATTTCCACCGCCTAC |
| | | ATGGAACTGTCCTCCCTGCGGAGCGAGGACACCGCCGTGTACTATTGC |
| | | GCCCGGGGACCATACTACTACTACATGGATGTCTGGGGGAAGGGGACT |
| | | ATGGTCACCGTGTCATCCGCCTCGGGAGGCGGCGGATCAGGAGGACGC |
| | | GCCTCTGGTGGTGGAGGATCGGAGATCGTGATGACCCAGAGCCCTCTC |
| | | TCCTTGCCCGTGACTCCTGGGGAGCCCGCATCCATTTCATGCCGGAGC |
| | | TCCCAGTCACTTCTCTACTCCAACGGCTATAACTACGTGGATTGGTAC |
| | | CTCCAAAAGCCGGGCCAGAGCCCGCAGCTGCTGATCTACCTGGGCTCG |
| | | AACAGGGCCAGCGGAGTGCCTGACCGGTTCTCCGGGTCGGGAAGCGGG |
| | | ACCGACTTCAAGCTGCAAATCTCGAGAGTGGAGGCCGAGGACGTGGGA |
| | | ATCTACTACTGTATGCAGGGCCGCCAGTTTCCGTACTCGTTCGGACAG |
| | | GGCACCAAAGTGGAAATCAAG |
| 139102-aa | 1005 | QVQLVQSGAEVKKPGASVKVSCKASGYTFSNYGITWVRQAPGQGLEWM |
| VH | | GWISAYNGNTNYAQKFQGRVTMTRNTSISTAYMELSSLRSEDTAVYYC |
| | | ARGPYYYYMDVWGKGTMVTVSS |
| 139102-aa | 1006 | EIVMTQSPLSLPVTPGEPASISCRSSQSLLYSNGYNYVDWYLQKPGQS |
| VL | | PQLLIYLGSNRASGVPDRFSGSGSGTDFKLQISRVEAEDVGIYYCMQG |
| | | RQFPYSFGQGTKVEIK |
| 139102-aa | 1007 | MALPVTALLLPLALLLHAARPQVQLVQSGAEVKKPGASVKVSCKASGY |
| Full CAR | | TFSNYGITWVRQAPGQGLEWMGWISAYNGNTNYAQKFQGRVTMTRNTS |
| | | ISTAYMELSSLRSEDTAVYYCARGPYYYYMDVWGKGTMVTVSSASGGG |
| | | GSGGRASGGGGSEIVMTQSPLSLPVTPGEPASISCRSSQSLLYSNGYN |
| | | YVDWYLQKPGQSPQLLIYLGSNRASGVPDRFSGSGSGTDEKLQISRVE |
| | | AEDVGIYYCMQGRQFPYSFGQGTKVEIKTTTPAPRPPTPAPTIASQPL |
| | | SLRPEACRPAAGGAVHTRGLDFACDIYIWAPLAGTCGVLLLSLVITLY |
| | | CKRGRKKLLYIFKQPFMRPVQTTQEEDGCSCRFPEEEEGGCELRVKFS |
| | | RSADAPAYKQGQNQLYNELNLGRREEYDVLDKRRGRDPEMGGKPRRKN |
| | | PQEGLYNELQKDKMAEAYSEIGMKGERRRGKGHDGLYQGLSTATKDTY |
| | | DALHMQALPPR |
| 139102-nt | 1008 | ATGGCCCTCCCTGTCACCGCCCTGCTGCTTCCGCTGGCTCTTCTGCTC |
| Full CAR | | CACGCCGCTCGGCCCCAAGTCCAACTGGTCCAGAGCGGTGCAGAAGTG |
| | | AAGAAGCCCGGAGCGAGCGTGAAAGTGTCCTGCAAGGCTTCCGGGTAC |
| | | ACCTTCTCCAACTACGGCATCACTTGGGTGCGCCAGGCCCCGGGACAG |
| | | GGCCTGGAATGGATGGGGTGGATTTCCGCGTACAACGGCAATACGAAC |
| | | TACGCTCAGAAGTTCCAGGGTAGAGTGACCATGACTAGGAACACCTCC |
| | | ATTTCCACCGCCTACATGGAACTGTCCTCCCTGCGGAGCGAGGACACC |
| | | GCCGTGTACTATTGCGCCCGGGGACCATACTACTACTACATGGATGTC |
| | | TGGGGGAAGGGGACTATGGTCACCGTGTCATCCGCCTCGGGAGGCGGC |
| | | GGATCAGGAGGACGCGCCTCTGGTGGTGGAGGATCGGAGATCGTGATG |
| | | ACCCAGAGCCCTCTCTCCTTGCCCGTGACTCCTGGGGAGCCCGCATCC |
| | | ATTTCATGCCGGAGCTCCCAGTCACTTCTCTACTCCAACGGCTATAAC |
| | | TACGTGGATTGGTACCTCCAAAAGCCGGGCCAGAGCCCGCAGCTGCTG |
| | | ATCTACCTGGGCTCGAACAGGGCCAGCGGAGTGCCTGACCGGTTCTCC |
| | | GGGTCGGGAAGCGGGACCGACTTCAAGCTGCAAATCTCGAGAGTGGAG |
| | | GCCGAGGACGTGGGAATCTACTACTGTATGCAGGGCCGCCAGTTTCCG |
| | | TACTCGTTCGGACAGGGCACCAAAGTGGAAATCAAGACCACTACCCCA |
| | | GCACCGAGGCCACCCACCCCGGCTCCTACCATCGCCTCCCAGCCTCTG |
| | | TCCCTGCGTCCGGAGGCATGTAGACCCGCAGCTGGTGGGGCCGTGCAT |
| | | ACCCGGGGTCTTGACTTCGCCTGCGATATCTACATTTGGGCCCCTCTG |
| | | GCTGGTACTTGCGGGGTCCTGCTGCTTTCACTCGTGATCACTCTTTAC |
| | | TGTAAGCGCGGTCGGAAGAAGCTGCTGTACATCTTTAAGCAACCCTTC |
| | | ATGAGGCCTGTGCAGACTACTCAAGAGGAGGACGGCTGTTCATGCCGG |
| | | TTCCCAGAGGAGGAGGAAGGCGGCTGCGAACTGCGCGTGAAATTCAGC |
| | | CGCAGCGCAGATGCTCCAGCCTACAAGCAGGGGCAGAACCAGCTCTAC |
| | | AACGAACTCAATCTTGGTCGGAGAGAGGAGTACGACGTGCTGGACAAG |
| | | CGGAGAGGACGGGACCCAGAAATGGGCGGGAAGCCGCGCAGAAAGAAT |
| | | CCCCAAGAGGGCCTGTACAACGAGCTCCAAAAGGATAAGATGGCAGAA |
| | | GCCTATAGCGAGATTGGTATGAAAGGGGAACGCAGAAGAGGCAAAGGC |
| | | CACGACGGACTGTACCAGGGACTCAGCACCGCCACCAAGGACACCTAT |
| | | GACGCTCTTCACATGCAGGCCCTGCCGCCTCGG |

139104

| | | |
|---|---|---|
| 139104-aa | 1009 | EVQLLETGGGLVQPGGSLRLSCAVSGFALSNHGMSWVRRAPGKGLEWV |
| ScFv | | SGIVYSGSTYYAASVKGRFTISRDNSRNTLYLQMNSLRPEDTAIYYCS |
| domain | | AHGGESDVWGQGTTVTVSSASGGGGSGGRASGGGGSEIVLTQSPATLS |
| | | VSPGESATLSCRASQSVSSNLAWYQQKPGQAPRLLIYGASTRASGIPD |
| | | RFSGSGSGTDFTLTISSLQAEDVAVYYCQQYGSSLTFGGGTKVEIK |
| 139104-nt | 1010 | GAAGTGCAATTGCTCGAAACTGGAGGAGGTCTGGTGCAACCTGGAGGA |
| ScFv | | TCACTTCGCCTGTCCTGCGCCGTGTCGGGCTTTGCCCTGTCCAACCAT |
| domain | | GGAATGAGCTGGGTCCGCCGCGCGCCGGGGAAGGGCCTCGAATGGGTG |
| | | TCCGGCATCGTCTACTCCGGCTCCACCTACTACGCCGCGTCCGTGAAG |
| | | GGCCGGTTCACGATTTCACGGGACAACTCGCGGAACACCCTGTACCTC |
| | | CAAATGAATTCCCTTCGGCCGGAGGATACTGCCATCTACTACTGCTCC |
| | | GCCCACGGTGGCGAATCCGACGTCTGGGGCCAGGGAACCACCGTGACC |
| | | GTGTCCAGCGCGTCCGGGGGAGGAGGAAGCGGGGGTAGAGCATCGGGT |
| | | GGAGGCGGATCAGAGATCGTGCTGACCCAGTCCCCCGCCACCTTGAGC |
| | | GTGTCACCAGGAGAGTCCGCCACCCTGTCATGCCGCGCCAGCCAGTCC |
| | | GTGTCCTCCAACCTGGCTTGGTACCAGCAGAAGCCGGGGCAGGCCCCT |
| | | AGACTCCTGATCTATGGGGCGTCGACCCGGGCATCTGGAATTCCCGAT |
| | | AGGTTCAGCGGATCGGGCTCGGGCACTGACTTCACTCTGACCATCTCC |
| | | TCGCTGCAAGCCGAGGACGTGGCTGTGTACTACTGTCAGCAGTACGGA |
| | | AGCTCCCTGACTTTCGGTGGCGGGACCAAAGTCGAGATTAAG |
| 139104-aa | 1011 | EVQLLETGGGLVQPGGSLRLSCAVSGFALSNHGMSWVRRAPGKGLEWV |
| VH | | SGIVYSGSTYYAASVKGRFTISRDNSRNTLYLQMNSLRPEDTAIYYCS |
| | | AHGGESDVWGQGTTVTVSS |
| 139104-aa | 1012 | EIVLTQSPATLSVSPGESATLSCRASQSVSSNLAWYQQKPGQAPRLLI |
| VL | | YGASTRASGIPDRFSGSGSGTDFTLTISSLQAEDVAVYYCQQYGSSLT |
| | | FGGGTKVEIK |
| 139104-aa | 1013 | MALPVTALLLPLALLLHAARPEVQLLETGGGLVQPGGSLRLSCAVSGF |
| Full CAR | | ALSNHGMSWVRRAPGKGLEWVSGIVYSGSTYYAASVKGRFTISRDNSR |
| | | NTLYLQMNSLRPEDTAIYYCSAHGGESDVWGQGTTVTVSSASGGGGSG |
| | | GRASGGGGSEIVLTQSPATLSVSPGESATLSCRASQSVSSNLAWYQQK |
| | | PGQAPRLLIYGASTRASGIPDRFSGSGSGTDFTLTISSLQAEDVAVYY |
| | | CQQYGSSLTFGGGTKVEIKTTTPAPRPPTPAPTIASQPLSLRPEACRP |
| | | AAGGAVHTRGLDFACDIYIWAPLAGTCGVLLLSLVITLYCKRGRKKLL |
| | | YIFKQPFMRPVQTTQEEDGCSCRFPEEEEGGCELRVKESRSADAPAYK |
| | | QGQNQLYNELNLGRREEYDVLDKRRGRDPEMGGKPRRKNPQEGLYNEL |
| | | QKDKMAEAYSEIGMKGERRRGKGHDGLYQGLSTATKDTYDALHMQALP |
| | | PR |
| 139104-nt | 1014 | ATGGCCCTCCCTGTCACCGCCCTGCTGCTTCCGCTGGCTCTTCTGCTC |
| Full CAR | | CACGCCGCTCGGCCCGAAGTGCAATTGCTCGAAACTGGAGGAGGTCTG |
| | | GTGCAACCTGGAGGATCACTTCGCCTGTCCTGCGCCGTGTCGGGCTTT |
| | | GCCCTGTCCAACCATGGAATGAGCTGGGTCCGCCGCGCGCCGGGGAAG |
| | | GGCCTCGAATGGGTGTCCGGCATCGTCTACTCCGGCTCCACCTACTAC |
| | | GCCGCGTCCGTGAAGGGCCGGTTCACGATTTCACGGGACAACTCGCGG |
| | | AACACCCTGTACCTCCAAATGAATTCCCTTCGGCCGGAGGATACTGCC |
| | | ATCTACTACTGCTCCGCCCACGGTGGCGAATCCGACGTCTGGGGCCAG |
| | | GGAACCACCGTGACCGTGTCCAGCGCGTCCGGGGGAGGAGGAAGCGGG |
| | | GGTAGAGCATCGGGTGGAGGCGGATCAGAGATCGTGCTGACCCAGTCC |
| | | CCCGCCACCTTGAGCGTGTCACCAGGAGAGTCCGCCACCCTGTCATGC |
| | | CGCGCCAGCCAGTCCGTGTCCTCCAACCTGGCTTGGTACCAGCAGAAG |
| | | CCGGGGCAGGCCCCTAGACTCCTGATCTATGGGGCGTCGACCCGGGCA |
| | | TCTGGAATTCCCGATAGGTTCAGCGGATCGGGCTCGGGCACTGACTTC |
| | | ACTCTGACCATCTCCTCGCTGCAAGCCGAGGACGTGGCTGTGTACTAC |
| | | TGTCAGCAGTACGGAAGCTCCCTGACTTTCGGTGGCGGGACCAAAGTC |
| | | GAGATTAAGACCACTACCCCAGCACCGAGGCCACCCACCCCGGCTCCT |
| | | ACCATCGCCTCCCAGCCTCTGTCCCTGCGTCCGGAGGCATGTAGACCC |
| | | GCAGCTGGTGGGGCCGTGCATACCCGGGGTCTTGACTTCGCCTGCGAT |
| | | ATCTACATTTGGGCCCCTCTGGCTGGTACTTGCGGGGTCCTGCTGCTT |
| | | TCACTCGTGATCACTCTTTACTGTAAGCGCGGTCGGAAGAAGCTGCTG |
| | | TACATCTTTAAGCAACCCTTCATGAGGCCTGTGCAGACTACTCAAGAG |
| | | GAGGACGGCTGTTCATGCCGGTTCCCAGAGGAGGAGGAAGGCGGCTGC |
| | | GAACTGCGCGTGAAATTCAGCCGCAGCGCAGATGCTCCAGCCTACAAG |
| | | CAGGGGCAGAACCAGCTCTACAACGAACTCAATCTTGGTCGGAGAGAG |
| | | GAGTACGACGTGCTGGACAAGCGGAGAGGACGGGACCCAGAAATGGGC |
| | | GGGAAGCCGCGCAGAAAGAATCCCCAAGAGGGCCTGTACAACGAGCTC |
| | | CAAAAGGATAAGATGGCAGAAGCCTATAGCGAGATTGGTATGAAAGGG |
| | | GAACGCAGAAGAGGCAAAGGCCACGACGGACTGTACCAGGGACTCAGC |
| | | ACCGCCACCAAGGACACCTATGACGCTCTTCACATGCAGGCCCTGCCG |
| | | CCTCGG |

139106

| | | |
|---|---|---|
| 139106-aa | 1015 | EVQLVETGGGLVQPGGSLRLSCAVSGFALSNHGMSWVRRAPGKGLEWV |
| ScFv | | SGIVYSGSTYYAASVKGRFTISRDNSRNTLYLQMNSLRPEDTAIYYCS |
| domain | | AHGGESDVWGQGTTVTVSSASGGGGSGGRASGGGGSEIVMTQSPATLS |
| | | VSPGERATLSCRASQSVSSKLAWYQQKPGQAPRLLMYGASIRATGIPD |
| | | RFSGSGSGTEFTLTISSLEPEDFAVYYCQQYGSSSWTFGQGTKVEIK |
| 139106-nt | 1016 | GAAGTGCAATTGGTGGAAACTGGAGGAGGACTTGTGCAACCTGGAGGA |
| ScFv | | TCATTGAGACTGAGCTGCGCAGTGTCGGGATTCGCCCTGAGCAACCAT |
| domain | | GGAATGTCCTGGGTCAGAAGGGCCCCTGGAAAAGGCCTCGAATGGGTG |
| | | TCAGGGATCGTGTACTCCGGTTCCACTTACTACGCCGCCTCCGTGAAG |
| | | GGGCGCTTCACTATCTCACGGGATAACTCCCGCAATACCCTGTACCTC |
| | | CAAATGAACAGCCTGCGGCCGGAGGATACCGCCATCTACTACTGTTCC |
| | | GCCCACGGTGGAGAGTCTGACGTCTGGGGCCAGGGAACTACCGTGACC |
| | | GTGTCCTCCGCGTCCGGCGGTGGAGGGAGCGGCGGCCGCGCCAGCGGC |
| | | GGCGGAGGCTCCGAGATCGTGATGACCCAGAGCCCCGCTACTCTGTCG |
| | | GTGTCGCCCGGAGAAAGGGCGACCCTGTCCTGCCGGGCGTCGCAGTCC |
| | | GTGAGCAGCAAGCTGGCTTGGTACCAGCAGAAGCCGGGCCAGGCACCA |
| | | CGCCTGCTTATGTACGGTGCCTCCATTCGGGCCACCGGAATCCCGGAC |
| | | CGGTTCTCGGGGTCGGGGTCCGGTACCGAGTTCACACTGACCATTTCC |
| | | TCGCTCGAGCCCGAGGACTTTGCCGTCTATTACTGCCAGCAGTACGGC |
| | | TCCTCCTCATGGACGTTCGGCCAGGGGACCAAGGTCGAAATCAAG |
| 139106-aa | 1017 | EVQLVETGGGLVQPGGSLRLSCAVSGFALSNHGMSWVRRAPGKGLEWV |
| VH | | SGIVYSGSTYYAASVKGRFTISRDNSRNTLYLQMNSLRPEDTAIYYCS |
| | | AHGGESDVWGQGTTVTVSS |
| 139106-aa | 1018 | EIVMTQSPATLSVSPGERATLSCRASQSVSSKLAWYQQKPGQAPRLLM |
| VL | | YGASIRATGIPDRFSGSGSGTEFTLTISSLEPEDFAVYYCQQYGSSSW |
| | | TFGQGTKVEIK |
| 139106-aa | 1019 | MALPVTALLLPLALLLHAARPEVQLVETGGGLVQPGGSLRLSCAVSGE |
| Full CAR | | ALSNHGMSWVRRAPGKGLEWVSGIVYSGSTYYAASVKGRFTISRDNSR |
| | | NTLYLQMNSLRPEDTAIYYCSAHGGESDVWGQGTTVTVSSASGGGGSG |
| | | GRASGGGGSEIVMTQSPATLSVSPGERATLSCRASQSVSSKLAWYQQK |
| | | PGQAPRLLMYGASIRATGIPDRFSGSGSGTEFTLTISSLEPEDFAVYY |
| | | CQQYGSSSWTFGQGTKVEIKTTTPAPRPPTPAPTIASQPLSLRPEACR |
| | | PAAGGAVHTRGLDFACDIYIWAPLAGTCGVLLLSLVITLYCKRGRKKL |
| | | LYIFKQPFMRPVQTTQEEDGCSCRFPEEEEGGCELRVKFSRSADAPAY |
| | | KQGQNQLYNELNLGRREEYDVLDKRRGRDPEMGGKPRRKNPQEGLYNE |
| | | LQKDKMAEAYSEIGMKGERRRGKGHDGLYQGLSTATKDTYDALHMQAL |
| | | PPR |
| 139106-nt | 1020 | ATGGCCCTCCCTGTCACCGCCCTGCTGCTTCCGCTGGCTCTTCTGCTC |
| Full CAR | | CACGCCGCTCGGCCCGAAGTGCAATTGGTGGAAACTGGAGGAGGACTT |
| | | GTGCAACCTGGAGGATCATTGAGACTGAGCTGCGCAGTGTCGGGATTC |
| | | GCCCTGAGCAACCATGGAATGTCCTGGGTCAGAAGGGCCCCTGGAAAA |
| | | GGCCTCGAATGGGTGTCAGGGATCGTGTACTCCGGTTCCACTTACTAC |
| | | GCCGCCTCCGTGAAGGGGCGCTTCACTATCTCACGGGATAACTCCCGC |
| | | AATACCCTGTACCTCCAAATGAACAGCCTGCGGCCGGAGGATACCGCC |
| | | ATCTACTACTGTTCCGCCCACGGTGGAGAGTCTGACGTCTGGGGCCAG |
| | | GGAACTACCGTGACCGTGTCCTCCGCGTCCGGCGGTGGAGGGAGCGGC |
| | | GGCCGCGCCAGCGGCGGCGGAGGCTCCGAGATCGTGATGACCCAGAGC |
| | | CCCGCTACTCTGTCGGTGTCGCCCGGAGAAAGGGCGACCCTGTCCTGC |
| | | CGGGCGTCGCAGTCCGTGAGCAGCAAGCTGGCTTGGTACCAGCAGAAG |
| | | CCGGGCCAGGCACCACGCCTGCTTATGTACGGTGCCTCCATTCGGGCC |
| | | ACCGGAATCCCGGACCGGTTCTCGGGGTCGGGGTCCGGTACCGAGTTC |
| | | ACACTGACCATTTCCTCGCTCGAGCCCGAGGACTTTGCCGTCTATTAC |
| | | TGCCAGCAGTACGGCTCCTCCTCATGGACGTTCGGCCAGGGGACCAAG |
| | | GTCGAAATCAAGACCACTACCCCAGCACCGAGGCCACCCACCCCGGCT |
| | | CCTACCATCGCCTCCCAGCCTCTGTCCCTGCGTCCGGAGGCATGTAGA |
| | | CCCGCAGCTGGTGGGGCCGTGCATACCCGGGGTCTTGACTTCGCCTGC |
| | | GATATCTACATTTGGGCCCCTCTGGCTGGTACTTGCGGGGTCCTGCTG |
| | | CTTTCACTCGTGATCACTCTTTACTGTAAGCGCGGTCGGAAGAAGCTG |
| | | CTGTACATCTTTAAGCAACCCTTCATGAGGCCTGTGCAGACTACTCAA |
| | | GAGGAGGACGGCTGTTCATGCCGGTTCCCAGAGGAGGAGGAAGGCGGC |
| | | TGCGAACTGCGCGTGAAATTCAGCCGCAGCGCAGATGCTCCAGCCTAC |
| | | AAGCAGGGGCAGAACCAGCTCTACAACGAACTCAATCTTGGTCGGAGA |
| | | GAGGAGTACGACGTGCTGGACAAGCGGAGAGGACGGGACCCAGAAATG |
| | | GGCGGGAAGCCGCGCAGAAAGAATCCCCAAGAGGGCCTGTACAACGAG |
| | | CTCCAAAAGGATAAGATGGCAGAAGCCTATAGCGAGATTGGTATGAAA |
| | | GGGGAACGCAGAAGAGGCAAAGGCCACGACGGACTGTACCAGGGACTC |
| | | AGCACCGCCACCAAGGACACCTATGACGCTCTTCACATGCAGGCCCTG |
| | | CCGCCTCGG |

139107

| | | |
|---|---|---|
| 139107-aa | 1021 | EVQLVETGGGVVQPGGSLRLSCAVSGFALSNHGMSWVRRAPGKGLEWV |
| ScFv | | SGIVYSGSTYYAASVKGRFTISRDNSRNTLYLQMNSLRPEDTAIYYCS |
| domain | | AHGGESDVWGQGTTVTVSSASGGGGSGGRASGGGGSEIVLTQSPGTLS |
| | | LSPGERATLSCRASQSVGSTNLAWYQQKPGQAPRLLIYDASNRATGIP |
| | | DRESGGGSGTDFTLTISRLEPEDFAVYYCQQYGSSPPWTFGQGTKVEI |
| | | K |
| 139107-nt | 1022 | GAAGTGCAATTGGTGGAGACTGGAGGAGGAGTGGTGCAACCTGGAGGA |
| ScFv | | AGCCTGAGACTGTCATGCGCGGTGTCGGGCTTCGCCCTCTCCAACCAC |
| domain | | GGAATGTCCTGGGTCCGCCGGGCCCCTGGGAAAGGACTTGAATGGGTG |
| | | TCCGGCATCGTGTACTCGGGTTCCACCTACTACGCGGCCTCAGTGAAG |
| | | GGCCGGTTTACTATTAGCCGCGACAACTCCAGAAACACACTGTACCTC |
| | | CAAATGAACTCGCTGCGGCCGGAAGATACCGCTATCTACTACTGCTCC |
| | | GCCCATGGGGGAGAGTCGGACGTCTGGGGACAGGGCACCACTGTCACT |
| | | GTGTCCAGCGCTTCCGGCGGTGGTGGAAGCGGGGGACGGGCCTCAGGA |
| | | GGCGGTGGCAGCGAGATTGTGCTGACCCAGTCCCCCGGGACCCTGAGC |
| | | CTGTCCCCGGGAGAAAGGGCCACCCTCTCCTGTCGGGCATCCCAGTCC |
| | | GTGGGGTCTACTAACCTTGCATGGTACCAGCAGAAGCCCGGCCAGGCC |
| | | CCTCGCCTGCTGATCTACGACGCGTCCAATAGAGCCACCGGCATCCCG |
| | | GATCGCTTCAGCGGAGGCGGATCGGGCACCGACTTCACCCTCACCATT |
| | | TCAAGGCTGGAACCGGAGGACTTCGCCGTGTACTACTGCCAGCAGTAT |
| | | GGTTCGTCCCCACCCTGGACGTTCGGCCAGGGGACTAAGGTCGAGATC |
| | | AAG |
| 139107-aa | 1023 | EVQLVETGGGVVQPGGSLRLSCAVSGFALSNHGMSWVRRAPGKGLEWV |
| VH | | SGIVYSGSTYYAASVKGRFTISRDNSRNTLYLQMNSLRPEDTAIYYCS |
| | | AHGGESDVWGQGTTVTVSS |
| 139107-aa | 1024 | EIVLTQSPGTLSLSPGERATLSCRASQSVGSTNLAWYQQKPGQAPRLL |
| VL | | IYDASNRATGIPDRFSGGGSGTDETLTISRLEPEDFAVYYCQQYGSSP |
| | | PWTFGQGTKVEIK |
| 139107-aa | 1025 | MALPVTALLLPLALLLHAARPEVQLVETGGGVVQPGGSLRLSCAVSGF |
| Full CAR | | ALSNHGMSWVRRAPGKGLEWVSGIVYSGSTYYAASVKGRFTISRDNSR |
| | | NTLYLQMNSLRPEDTAIYYCSAHGGESDVWGQGTTVTVSSASGGGGSG |
| | | GRASGGGGSEIVLTQSPGTLSLSPGERATLSCRASQSVGSTNLAWYQQ |
| | | KPGQAPRLLIYDASNRATGIPDRFSGGGSGTDFTLTISRLEPEDFAVY |
| | | YCQQYGSSPPWTFGQGTKVEIKTTTPAPRPPTPAPTIASQPLSLRPEA |
| | | CRPAAGGAVHTRGLDFACDIYIWAPLAGTCGVLLLSLVITLYCKRGRK |
| | | KLLYIFKQPFMRPVQTTQEEDGCSCRFPEEEEGGCELRVKFSRSADAP |
| | | AYKQGQNQLYNELNLGRREEYDVLDKRRGRDPEMGGKPRRKNPQEGLY |
| | | NELQKDKMAEAYSEIGMKGERRRGKGHDGLYQGLSTATKDTYDALHMQ |
| | | ALPPR |
| 139107-nt | 1026 | ATGGCCCTCCCTGTCACCGCCCTGCTGCTTCCGCTGGCTCTTCTGCTC |
| Full CAR | | CACGCCGCTCGGCCCGAAGTGCAATTGGTGGAGACTGGAGGAGGAGTG |
| | | GTGCAACCTGGAGGAAGCCTGAGACTGTCATGCGCGGTGTCGGGCTTC |
| | | GCCCTCTCCAACCACGGAATGTCCTGGGTCCGCCGGGCCCCTGGGAAA |
| | | GGACTTGAATGGGTGTCCGGCATCGTGTACTCGGGTTCCACCTACTAC |
| | | GCGGCCTCAGTGAAGGGCCGGTTTACTATTAGCCGCGACAACTCCAGA |
| | | AACACACTGTACCTCCAAATGAACTCGCTGCGGCCGGAAGATACCGCT |
| | | ATCTACTACTGCTCCGCCCATGGGGGAGAGTCGGACGTCTGGGGACAG |
| | | GGCACCACTGTCACTGTGTCCAGCGCTTCCGGCGGTGGTGGAAGCGGG |
| | | GGACGGGCCTCAGGAGGCGGTGGCAGCGAGATTGTGCTGACCCAGTCC |
| | | CCCGGGACCCTGAGCCTGTCCCCGGGAGAAAGGGCCACCCTCTCCTGT |
| | | CGGGCATCCCAGTCCGTGGGGTCTACTAACCTTGCATGGTACCAGCAG |
| | | AAGCCCGGCCAGGCCCCTCGCCTGCTGATCTACGACGCGTCCAATAGA |
| | | GCCACCGGCATCCCGGATCGCTTCAGCGGAGGCGGATCGGGCACCGAC |
| | | TTCACCCTCACCATTTCAAGGCTGGAACCGGAGGACTTCGCCGTGTAC |
| | | TACTGCCAGCAGTATGGTTCGTCCCCACCCTGGACGTTCGGCCAGGGG |
| | | ACTAAGGTCGAGATCAAGACCACTACCCCAGCACCGAGGCCACCCACC |
| | | CCGGCTCCTACCATCGCCTCCCAGCCTCTGTCCCTGCGTCCGGAGGCA |
| | | TGTAGACCCGCAGCTGGTGGGGCCGTGCATACCCGGGGTCTTGACTTC |
| | | GCCTGCGATATCTACATTTGGGCCCCTCTGGCTGGTACTTGCGGGGTC |
| | | CTGCTGCTTTCACTCGTGATCACTCTTTACTGTAAGCGCGGTCGGAAG |
| | | AAGCTGCTGTACATCTTTAAGCAACCCTTCATGAGGCCTGTGCAGACT |
| | | ACTCAAGAGGAGGACGGCTGTTCATGCCGGTTCCCAGAGGAGGAGGAA |
| | | GGCGGCTGCGAACTGCGCGTGAAATTCAGCCGCAGCGCAGATGCTCCA |
| | | GCCTACAAGCAGGGGCAGAACCAGCTCTACAACGAACTCAATCTTGGT |
| | | CGGAGAGAGGAGTACGACGTGCTGGACAAGCGGAGAGGACGGGACCCA |
| | | GAAATGGGCGGGAAGCCGCGCAGAAAGAATCCCCAAGAGGGCCTGTAC |
| | | AACGAGCTCCAAAAGGATAAGATGGCAGAAGCCTATAGCGAGATTGGT |
| | | ATGAAAGGGGAACGCAGAAGAGGCAAAGGCCACGACGGACTGTACCAG |
| | | GGACTCAGCACCGCCACCAAGGACACCTATGACGCTCTTCACATGCAG |
| | | GCCCTGCCGCCTCGG |

139108

| | | |
|---|---|---|
| 139108-aa | 1027 | QVQLVESGGGLVKPGGSLRLSCAASGFTFSDYYMSWIRQAPGKGLEWV |
| ScFv | | SYISSSGSTIYYADSVKGRFTISRDNAKNSLYLQMNSLRAEDTAVYYC |
| domain | | ARESGDGMDVWGQGTTVTVSSASGGGGSGGRASGGGGSDIQMTQSPSS |
| | | LSASVGDRVTITCRASQSISSYLNWYQQKPGKAPKLLIYAASSLQSGV |
| | | PSRFSGSGSGTDFTLTISSLQPEDFATYYCQQSYTLAFGQGTKVDIK |
| 139108-nt | 1028 | CAAGTGCAACTCGTGGAATCTGGTGGAGGACTCGTGAAACCTGGAGGA |
| ScFv | | TCATTGAGACTGTCATGCGCGGCCTCGGGATTCACGTTCTCCGATTAC |
| domain | | TACATGAGCTGGATTCGCCAGGCTCCGGGGAAGGGACTGGAATGGGTG |
| | | TCCTACATTTCCTCATCCGGCTCCACCATCTACTACGCGGACTCCGTG |
| | | AAGGGGAGATTCACCATTAGCCGCGATAACGCCAAGAACAGCCTGTAC |
| | | CTTCAGATGAACTCCCTGCGGGCTGAAGATACTGCCGTCTACTACTGC |
| | | GCAAGGGAGAGCGGAGATGGGATGGACGTCTGGGGACAGGGTACCACT |
| | | GTGACCGTGTCGTCGGCCTCCGGCGGAGGGGGTTCGGGTGGAAGGGCC |
| | | AGCGGCGGCGGAGGCAGCGACATCCAGATGACCCAGTCCCCCTCATCG |
| | | CTGTCCGCCTCCGTGGGCGACCGCGTCACCATCACATGCCGGGCCTCA |
| | | CAGTCGATCTCCTCCTACCTCAATTGGTATCAGCAGAAGCCCGGAAAG |
| | | GCCCCTAAGCTTCTGATCTACGCAGCGTCCTCCCTGCAATCCGGGGTC |
| | | CCATCTCGGTTCTCCGGCTCGGGCAGCGGTACCGACTTCACTCTGACC |
| | | ATCTCGAGCCTGCAGCCGGAGGACTTCGCCACTTACTACTGTCAGCAA |
| | | AGCTACACCCTCGCGTTTGGCCAGGGCACCAAAGTGGACATCAAG |
| 139108-aa | 1029 | QVQLVESGGGLVKPGGSLRLSCAASGFTFSDYYMSWIRQAPGKGLEWV |
| VH | | SYISSSGSTIYYADSVKGRFTISRDNAKNSLYLQMNSLRAEDTAVYYC |
| | | ARESGDGMDVWGQGTTVTVSS |
| 139108-aa | 1030 | DIQMTQSPSSLSASVGDRVTITCRASQSISSYLNWYQQKPGKAPKLLI |
| VL | | YAASSLQSGVPSRFSGSGSGTDFTLTISSLQPEDFATYYCQQSYTLAF |
| | | GQGTKVDIK |
| 139108-aa | 1031 | MALPVTALLLPLALLLHAARPQVQLVESGGGLVKPGGSLRLSCAASGF |
| Full CAR | | TFSDYYMSWIRQAPGKGLEWVSYISSSGSTIYYADSVKGRFTISRDNA |
| | | KNSLYLQMNSLRAEDTAVYYCARESGDGMDVWGQGTTVTVSSASGGGG |
| | | SGGRASGGGGSDIQMTQSPSSLSASVGDRVTITCRASQSISSYLNWYQ |
| | | QKPGKAPKLLIYAASSLQSGVPSRESGSGSGTDFTLTISSLQPEDFAT |
| | | YYCQQSYTLAFGQGTKVDIKTTTPAPRPPTPAPTIASQPLSLRPEACR |
| | | PAAGGAVHTRGLDFACDIYIWAPLAGTCGVLLLSLVITLYCKRGRKKL |
| | | LYIFKQPFMRPVQTTQEEDGCSCRFPEEEEGGCELRVKFSRSADAPAY |
| | | KQGQNQLYNELNLGRREEYDVLDKRRGRDPEMGGKPRRKNPQEGLYNE |
| | | LQKDKMAEAYSEIGMKGERRRGKGHDGLYQGLSTATKDTYDALHMQAL |
| | | PPR |
| 139108-nt | 1032 | ATGGCCCTCCCTGTCACCGCCCTGCTGCTTCCGCTGGCTCTTCTGCTC |
| Full CAR | | CACGCCGCTCGGCCCCAAGTGCAACTCGTGGAATCTGGTGGAGGACTC |
| | | GTGAAACCTGGAGGATCATTGAGACTGTCATGCGCGGCCTCGGGATTC |
| | | ACGTTCTCCGATTACTACATGAGCTGGATTCGCCAGGCTCCGGGGAAG |
| | | GGACTGGAATGGGTGTCCTACATTTCCTCATCCGGCTCCACCATCTAC |
| | | TACGCGGACTCCGTGAAGGGGAGATTCACCATTAGCCGCGATAACGCC |
| | | AAGAACAGCCTGTACCTTCAGATGAACTCCCTGCGGGCTGAAGATACT |
| | | GCCGTCTACTACTGCGCAAGGGAGAGCGGAGATGGGATGGACGTCTGG |
| | | GGACAGGGTACCACTGTGACCGTGTCGTCGGCCTCCGGCGGAGGGGGT |
| | | TCGGGTGGAAGGGCCAGCGGCGGCGGAGGCAGCGACATCCAGATGACC |
| | | CAGTCCCCCTCATCGCTGTCCGCCTCCGTGGGCGACCGCGTCACCATC |
| | | ACATGCCGGGCCTCACAGTCGATCTCCTCCTACCTCAATTGGTATCAG |
| | | CAGAAGCCCGGAAAGGCCCCTAAGCTTCTGATCTACGCAGCGTCCTCC |
| | | CTGCAATCCGGGGTCCCATCTCGGTTCTCCGGCTCGGGCAGCGGTACC |
| | | GACTTCACTCTGACCATCTCGAGCCTGCAGCCGGAGGACTTCGCCACT |
| | | TACTACTGTCAGCAAAGCTACACCCTCGCGTTTGGCCAGGGCACCAAA |
| | | GTGGACATCAAGACCACTACCCCAGCACCGAGGCCACCCACCCCGGCT |
| | | CCTACCATCGCCTCCCAGCCTCTGTCCCTGCGTCCGGAGGCATGTAGA |
| | | CCCGCAGCTGGTGGGGCCGTGCATACCCGGGGTCTTGACTTCGCCTGC |
| | | GATATCTACATTTGGGCCCCTCTGGCTGGTACTTGCGGGGTCCTGCTG |
| | | CTTTCACTCGTGATCACTCTTTACTGTAAGCGCGGTCGGAAGAAGCTG |
| | | CTGTACATCTTTAAGCAACCCTTCATGAGGCCTGTGCAGACTACTCAA |
| | | GAGGAGGACGGCTGTTCATGCCGGTTCCCAGAGGAGGAGGAAGGCGGC |
| | | TGCGAACTGCGCGTGAAATTCAGCCGCAGCGCAGATGCTCCAGCCTAC |
| | | AAGCAGGGGCAGAACCAGCTCTACAACGAACTCAATCTTGGTCGGAGA |
| | | GAGGAGTACGACGTGCTGGACAAGCGGAGAGGACGGGACCCAGAAATG |
| | | GGCGGGAAGCCGCGCAGAAAGAATCCCCAAGAGGGCCTGTACAACGAG |
| | | CTCCAAAAGGATAAGATGGCAGAAGCCTATAGCGAGATTGGTATGAAA |
| | | GGGGAACGCAGAAGAGGCAAAGGCCACGACGGACTGTACCAGGGACTC |
| | | AGCACCGCCACCAAGGACACCTATGACGCTCTTCACATGCAGGCCCTG |
| | | CCGCCTCGG |

139110

| | | |
|---|---|---|
| 139110-aa | 1033 | QVQLVQSGGGLVKPGGSLRLSCAASGFTFSDYYMSWIRQAPGKGLEWV |
| ScFv | | SYISSSGNTIYYADSVKGRFTISRDNAKNSLYLQMNSLRAEDTAVYYC |
| domain | | ARSTMVREDYWGQGTLVTVSSASGGGGSGGRASGGGGSDIVLTQSPLS |
| | | LPVTLGQPASISCKSSESLVHNSGKTYLNWFHQRPGQSPRRLIYEVSN |
| | | RDSGVPDRFTGSGSGTDFTLKISRVEAEDVGVYYCMQGTHWPGTFGQG |
| | | TKLEIK |
| 139110-nt | 1034 | CAAGTGCAACTGGTGCAAAGCGGAGGAGGATTGGTCAAACCCGGAGGA |
| ScFv | | AGCCTGAGACTGTCATGCGCGGCCTCTGGATTCACCTTCTCCGATTAC |
| domain | | TACATGTCATGGATCAGACAGGCCCCGGGGAAGGGCCTCGAATGGGTG |
| | | TCCTACATCTCGTCCTCCGGGAACACCATCTACTACGCCGACAGCGTG |
| | | AAGGGCCGCTTTACCATTTCCCGCGACAACGCAAAGAACTCGCTGTAC |
| | | CTTCAGATGAATTCCCTGCGGGCTGAAGATACCGCGGTGTACTATTGC |
| | | GCCCGGTCCACTATGGTCCGGGAGGACTACTGGGGACAGGGCACACTC |
| | | GTGACCGTGTCCAGCGCGAGCGGGGGTGGAGGCAGCGGTGGACGCGCC |
| | | TCCGGCGGCGGCGGTTCAGACATCGTGCTGACTCAGTCGCCCCTGTCG |
| | | CTGCCGGTCACCCTGGGCCAACCGGCCTCAATTAGCTGCAAGTCCTCG |
| | | GAGAGCCTGGTGCACAACTCAGGAAAGACTTACCTGAACTGGTTCCAT |
| | | CAGCGGCCTGGACAGTCCCCACGGAGGCTCATCTATGAAGTGTCCAAC |
| | | AGGGATTCGGGGGTGCCCGACCGCTTCACTGGCTCCGGGTCCGGCACC |
| | | GACTTCACCTTGAAAATCTCCAGAGTGGAAGCCGAGGACGTGGGCGTG |
| | | TACTACTGTATGCAGGGTACCCACTGGCCTGGAACCTTTGGACAAGGA |
| | | ACTAAGCTCGAGATTAAG |
| 139110-aa | 1035 | QVQLVQSGGGLVKPGGSLRLSCAASGFTFSDYYMSWIRQAPGKGLEWV |
| VH | | SYISSSGNTIYYADSVKGRFTISRDNAKNSLYLQMNSLRAEDTAVYYC |
| | | ARSTMVREDYWGQGTLVTVSS |
| 139110-aa | 1036 | DIVLTQSPLSLPVTLGQPASISCKSSESLVHNSGKTYLNWFHQRPGQS |
| VL | | PRRLIYEVSNRDSGVPDRFTGSGSGTDFTLKISRVEAEDVGVYYCMQG |
| | | THWPGTFGQGTKLEIK |
| 139110-aa | 1037 | MALPVTALLLPLALLLHAARPQVQLVQSGGGLVKPGGSLRLSCAASGF |
| Full CAR | | TFSDYYMSWIRQAPGKGLEWVSYISSSGNTIYYADSVKGRFTISRDNA |
| | | KNSLYLQMNSLRAEDTAVYYCARSTMVREDYWGQGTLVTVSSASGGGG |
| | | SGGRASGGGGSDIVLTQSPLSLPVTLGQPASISCKSSESLVHNSGKTY |
| | | LNWFHQRPGQSPRRLIYEVSNRDSGVPDRFTGSGSGTDFTLKISRVEA |
| | | EDVGVYYCMQGTHWPGTFGQGTKLEIKTTTPAPRPPTPAPTIASQPLS |
| | | LRPEACRPAAGGAVHTRGLDFACDIYIWAPLAGTCGVLLLSLVITLYC |
| | | KRGRKKLLYIFKQPFMRPVQTTQEEDGCSCRFPEEEEGGCELRVKFSR |
| | | SADAPAYKQGQNQLYNELNLGRREEYDVLDKRRGRDPEMGGKPRRKNP |
| | | QEGLYNELQKDKMAEAYSEIGMKGERRRGKGHDGLYQGLSTATKDTYD |
| | | ALHMQALPPR |
| 139110-nt | 1038 | ATGGCCCTCCCTGTCACCGCCCTGCTGCTTCCGCTGGCTCTTCTGCTC |
| Full CAR | | CACGCCGCTCGGCCCCAAGTGCAACTGGTGCAAAGCGGAGGAGGATTG |
| | | GTCAAACCCGGAGGAAGCCTGAGACTGTCATGCGCGGCCTCTGGATTC |
| | | ACCTTCTCCGATTACTACATGTCATGGATCAGACAGGCCCCGGGGAAG |
| | | GGCCTCGAATGGGTGTCCTACATCTCGTCCTCCGGGAACACCATCTAC |
| | | TACGCCGACAGCGTGAAGGGCCGCTTTACCATTTCCCGCGACAACGCA |
| | | AAGAACTCGCTGTACCTTCAGATGAATTCCCTGCGGGCTGAAGATACC |
| | | GCGGTGTACTATTGCGCCCGGTCCACTATGGTCCGGGAGGACTACTGG |
| | | GGACAGGGCACACTCGTGACCGTGTCCAGCGCGAGCGGGGGTGGAGGC |
| | | AGCGGTGGACGCGCCTCCGGCGGCGGCGGTTCAGACATCGTGCTGACT |
| | | CAGTCGCCCCTGTCGCTGCCGGTCACCCTGGGCCAACCGGCCTCAATT |
| | | AGCTGCAAGTCCTCGGAGAGCCTGGTGCACAACTCAGGAAAGACTTAC |
| | | CTGAACTGGTTCCATCAGCGGCCTGGACAGTCCCCACGGAGGCTCATC |
| | | TATGAAGTGTCCAACAGGGATTCGGGGGTGCCCGACCGCTTCACTGGC |
| | | TCCGGGTCCGGCACCGACTTCACCTTGAAAATCTCCAGAGTGGAAGCC |
| | | GAGGACGTGGGCGTGTACTACTGTATGCAGGGTACCCACTGGCCTGGA |
| | | ACCTTTGGACAAGGAACTAAGCTCGAGATTAAGACCACTACCCCAGCA |
| | | CCGAGGCCACCCACCCCGGCTCCTACCATCGCCTCCCAGCCTCTGTCC |
| | | CTGCGTCCGGAGGCATGTAGACCCGCAGCTGGTGGGGCCGTGCATACC |
| | | CGGGGTCTTGACTTCGCCTGCGATATCTACATTTGGGCCCCTCTGGCT |
| | | GGTACTTGCGGGGTCCTGCTGCTTTCACTCGTGATCACTCTTTACTGT |
| | | AAGCGCGGTCGGAAGAAGCTGCTGTACATCTTTAAGCAACCCTTCATG |
| | | AGGCCTGTGCAGACTACTCAAGAGGAGGACGGCTGTTCATGCCGGTTC |
| | | CCAGAGGAGGAGGAAGGCGGCTGCGAACTGCGCGTGAAATTCAGCCGC |
| | | AGCGCAGATGCTCCAGCCTACAAGCAGGGGCAGAACCAGCTCTACAAC |
| | | GAACTCAATCTTGGTCGGAGAGAGGAGTACGACGTGCTGGACAAGCGG |
| | | AGAGGACGGGACCCAGAAATGGGCGGGAAGCCGCGCAGAAAGAATCCC |
| | | CAAGAGGGCCTGTACAACGAGCTCCAAAAGGATAAGATGGCAGAAGCC |
| | | TATAGCGAGATTGGTATGAAAGGGGAACGCAGAAGAGGCAAAGGCCAC |
| | | GACGGACTGTACCAGGGACTCAGCACCGCCACCAAGGACACCTATGAC |
| | | GCTCTTCACATGCAGGCCCTGCCGCCTCGG |

139112

| | | |
|---|---|---|
| 139112-aa | 1039 | QVQLVESGGGLVQPGGSLRLSCAVSGFALSNHGMSWVRRAPGKGLEWV |
| ScFv | | SGIVYSGSTYYAASVKGRFTISRDNSRNTLYLQMNSLRPEDTAIYYCS |
| domain | | AHGGESDVWGQGTTVTVSSASGGGGSGGRASGGGGSDIRLTQSPSPLS |
| | | ASVGDRVTITCQASEDINKFLNWYHQTPGKAPKLLIYDASTLQTGVPS |
| | | RFSGSGSGTDFTLTINSLQPEDIGTYYCQQYESLPLTFGGGTKVEIK |
| 139112-nt | 1040 | CAAGTGCAACTCGTGGAATCTGGTGGAGGACTCGTGCAACCCGGTGGA |
| ScFv | | AGCCTTAGGCTGTCGTGCGCCGTCAGCGGGTTTGCTCTGAGCAACCAT |
| domain | | GGAATGTCCTGGGTCCGCCGGGCACCGGGAAAAGGGCTGGAATGGGTG |
| | | TCCGGCATCGTGTACAGCGGGTCAACCTATTACGCCGCGTCCGTGAAG |
| | | GGCAGATTCACTATCTCAAGAGACAACAGCCGGAACACCCTGTACTTG |
| | | CAAATGAATTCCCTGCGCCCCGAGGACACCGCCATCTACTACTGCTCC |
| | | GCCCACGGAGGAGAGTCGGACGTGTGGGGCCAGGGAACGACTGTGACT |
| | | GTGTCCAGCGCATCAGGAGGGGGTGGTTCGGGCGGCCGGGCCTCGGGG |
| | | GGAGGAGGTTCCGACATTCGGCTGACCCAGTCCCCGTCCCCACTGTCG |
| | | GCCTCCGTCGGCGACCGCGTGACCATCACTTGTCAGGCGTCCGAGGAC |
| | | ATTAACAAGTTCCTGAACTGGTACCACCAGACCCCTGGAAAGGCCCCC |
| | | AAGCTGCTGATCTACGATGCCTCGACCCTTCAAACTGGAGTGCCTAGC |
| | | CGGTTCTCCGGGTCCGGCTCCGGCACTGATTTCACTCTGACCATCAAC |
| | | TCATTGCAGCCGGAAGATATCGGGACCTACTATTGCCAGCAGTACGAA |
| | | TCCCTCCCGCTCACATTCGGCGGGGGAACCAAGGTCGAGATTAAG |
| 139112-aa | 1041 | QVQLVESGGGLVQPGGSLRLSCAVSGFALSNHGMSWVRRAPGKGLEWV |
| VH | | SGIVYSGSTYYAASVKGRFTISRDNSRNTLYLQMNSLRPEDTAIYYCS |
| | | AHGGESDVWGQGTTVTVSS |
| 139112-aa | 1042 | DIRLTQSPSPLSASVGDRVTITCQASEDINKFLNWYHQTPGKAPKLLI |
| VL | | YDASTLQTGVPSRFSGSGSGTDFTLTINSLQPEDIGTYYCQQYESLPL |
| | | TFGGGTKVEIK |
| 139112-aa | 1043 | MALPVTALLLPLALLLHAARPQVQLVESGGGLVQPGGSLRLSCAVSGF |
| Full CAR | | ALSNHGMSWVRRAPGKGLEWVSGIVYSGSTYYAASVKGRFTISRDNSR |
| | | NTLYLQMNSLRPEDTAIYYCSAHGGESDVWGQGTTVTVSSASGGGGSG |
| | | GRASGGGGSDIRLTQSPSPLSASVGDRVTITCQASEDINKELNWYHQT |
| | | PGKAPKLLIYDASTLQTGVPSRFSGSGSGTDFTLTINSLQPEDIGTYY |
| | | CQQYESLPLTFGGGTKVEIKTTTPAPRPPTPAPTIASQPLSLRPEACR |
| | | PAAGGAVHTRGLDFACDIYIWAPLAGTCGVLLLSLVITLYCKRGRKKL |
| | | LYIFKQPFMRPVQTTQEEDGCSCRFPEEEEGGCELRVKFSRSADAPAY |
| | | KQGQNQLYNELNLGRREEYDVLDKRRGRDPEMGGKPRRKNPQEGLYNE |
| | | LQKDKMAEAYSEIGMKGERRRGKGHDGLYQGLSTATKDTYDALHMQAL |
| | | PPR |
| 139112-nt | 1044 | ATGGCCCTCCCTGTCACCGCCCTGCTGCTTCCGCTGGCTCTTCTGCTC |
| Full CAR | | CACGCCGCTCGGCCCCAAGTGCAACTCGTGGAATCTGGTGGAGGACTC |
| | | GTGCAACCCGGTGGAAGCCTTAGGCTGTCGTGCGCCGTCAGCGGGTTT |
| | | GCTCTGAGCAACCATGGAATGTCCTGGGTCCGCCGGGCACCGGGAAAA |
| | | GGGCTGGAATGGGTGTCCGGCATCGTGTACAGCGGGTCAACCTATTAC |
| | | GCCGCGTCCGTGAAGGGCAGATTCACTATCTCAAGAGACAACAGCCGG |
| | | AACACCCTGTACTTGCAAATGAATTCCCTGCGCCCCGAGGACACCGCC |
| | | ATCTACTACTGCTCCGCCCACGGAGGAGAGTCGGACGTGTGGGGCCAG |
| | | GGAACGACTGTGACTGTGTCCAGCGCATCAGGAGGGGGTGGTTCGGGC |
| | | GGCCGGGCCTCGGGGGGAGGAGGTTCCGACATTCGGCTGACCCAGTCC |
| | | CCGTCCCCACTGTCGGCCTCCGTCGGCGACCGCGTGACCATCACTTGT |
| | | CAGGCGTCCGAGGACATTAACAAGTTCCTGAACTGGTACCACCAGACC |
| | | CCTGGAAAGGCCCCCAAGCTGCTGATCTACGATGCCTCGACCCTTCAA |
| | | ACTGGAGTGCCTAGCCGGTTCTCCGGGTCCGGCTCCGGCACTGATTTC |
| | | ACTCTGACCATCAACTCATTGCAGCCGGAAGATATCGGGACCTACTAT |
| | | TGCCAGCAGTACGAATCCCTCCCGCTCACATTCGGCGGGGGAACCAAG |
| | | GTCGAGATTAAGACCACTACCCCAGCACCGAGGCCACCCACCCCGGCT |
| | | CCTACCATCGCCTCCCAGCCTCTGTCCCTGCGTCCGGAGGCATGTAGA |
| | | CCCGCAGCTGGTGGGGCCGTGCATACCCGGGGTCTTGACTTCGCCTGC |
| | | GATATCTACATTTGGGCCCCTCTGGCTGGTACTTGCGGGGTCCTGCTG |
| | | CTTTCACTCGTGATCACTCTTTACTGTAAGCGCGGTCGGAAGAAGCTG |
| | | CTGTACATCTTTAAGCAACCCTTCATGAGGCCTGTGCAGACTACTCAA |
| | | GAGGAGGACGGCTGTTCATGCCGGTTCCCAGAGGAGGAGGAAGGCGGC |
| | | TGCGAACTGCGCGTGAAATTCAGCCGCAGCGCAGATGCTCCAGCCTAC |
| | | AAGCAGGGGCAGAACCAGCTCTACAACGAACTCAATCTTGGTCGGAGA |
| | | GAGGAGTACGACGTGCTGGACAAGCGGAGAGGACGGGACCCAGAAATG |
| | | GGCGGGAAGCCGCGCAGAAAGAATCCCCAAGAGGGCCTGTACAACGAG |
| | | CTCCAAAAGGATAAGATGGCAGAAGCCTATAGCGAGATTGGTATGAAA |
| | | GGGGAACGCAGAAGAGGCAAAGGCCACGACGGACTGTACCAGGGACTC |
| | | AGCACCGCCACCAAGGACACCTATGACGCTCTTCACATGCAGGCCCTG |
| | | CCGCCTCGG |

139113

| | | |
|---|---|---|
| 139113-aa | 1045 | EVQLVETGGGLVQPGGSLRLSCAVSGFALSNHGMSWVRRAPGKGLEWV |
| ScFv | | SGIVYSGSTYYAASVKGRFTISRDNSRNTLYLQMNSLRPEDTAIYYCS |
| domain | | AHGGESDVWGQGTTVTVSSASGGGGSGGRASGGGGSETTLTQSPATLS |
| | | VSPGERATLSCRASQSVGSNLAWYQQKPGQGPRLLIYGASTRATGIPA |
| | | RFSGSGSGTEFTLTISSLQPEDFAVYYCQQYNDWLPVTFGQGTKVEIK |
| 139113-nt | 1046 | GAAGTGCAATTGGTGGAAACTGGAGGAGGACTTGTGCAACCTGGAGGA |
| ScFv | | TCATTGCGGCTCTCATGCGCTGTCTCCGGCTTCGCCCTGTCAAATCAC |
| domain | | GGGATGTCGTGGGTCAGACGGGCCCCGGGAAAGGGTCTGGAATGGGTG |
| | | TCGGGGATTGTGTACAGCGGCTCCACCTACTACGCCGCTTCGGTCAAG |
| | | GGCCGCTTCACTATTTCACGGGACAACAGCCGCAACACCCTCTATCTG |
| | | CAAATGAACTCTCTCCGCCCGGAGGATACCGCCATCTACTACTGCTCC |
| | | GCACACGGCGGCGAATCCGACGTGTGGGGACAGGGAACCACTGTCACC |
| | | GTGTCGTCCGCATCCGGTGGCGGAGGATCGGGTGGCCGGGCCTCCGGG |
| | | GGCGGCGGCAGCGAGACTACCCTGACCCAGTCCCCTGCCACTCTGTCC |
| | | GTGAGCCCGGGAGAGAGAGCCACCCTTAGCTGCCGGGCCAGCCAGAGC |
| | | GTGGGCTCCAACCTGGCCTGGTACCAGCAGAAGCCAGGACAGGGTCCC |
| | | AGGCTGCTGATCTACGGAGCCTCCACTCGCGCGACCGGCATCCCCGCG |
| | | AGGTTCTCCGGGTCGGGTTCCGGGACCGAGTTCACCCTGACCATCTCC |
| | | TCCCTCCAACCGGAGGACTTCGCGGTGTACTACTGTCAGCAGTACAAC |
| | | GATTGGCTGCCCGTGACATTTGGACAGGGGACGAAGGTGGAAATCAAA |
| 139113-aa | 1047 | EVQLVETGGGLVQPGGSLRLSCAVSGFALSNHGMSWVRRAPGKGLEWV |
| VH | | SGIVYSGSTYYAASVKGRFTISRDNSRNTLYLQMNSLRPEDTAIYYCS |
| | | AHGGESDVWGQGTTVTVSS |
| 139113-aa | 1048 | ETTLTQSPATLSVSPGERATLSCRASQSVGSNLAWYQQKPGQGPRLLI |
| VL | | YGASTRATGIPARFSGSGSGTEFTLTISSLQPEDFAVYYCQQYNDWLP |
| | | VTFGQGTKVEIK |
| 139113-aa | 1049 | MALPVTALLLPLALLLHAARPEVQLVETGGGLVQPGGSLRLSCAVSGF |
| Full CAR | | ALSNHGMSWVRRAPGKGLEWVSGIVYSGSTYYAASVKGRFTISRDNSR |
| | | NTLYLQMNSLRPEDTAIYYCSAHGGESDVWGQGTTVTVSSASGGGGSG |
| | | GRASGGGGSETTLTQSPATLSVSPGERATLSCRASQSVGSNLAWYQQK |
| | | PGQGPRLLIYGASTRATGIPARESGSGSGTEFTLTISSLQPEDFAVYY |
| | | CQQYNDWLPVTFGQGTKVEIKTTTPAPRPPTPAPTIASQPLSLRPEAC |
| | | RPAAGGAVHTRGLDFACDIYIWAPLAGTCGVLLLSLVITLYCKRGRKK |
| | | LLYIFKQPFMRPVQTTQEEDGCSCRFPEEEEGGCELRVKFSRSADAPA |
| | | YKQGQNQLYNELNLGRREEYDVLDKRRGRDPEMGGKPRRKNPQEGLYN |
| | | ELQKDKMAEAYSEIGMKGERRRGKGHDGLYQGLSTATKDTYDALHMQA |
| | | LPPR |
| 139113-nt | 1050 | ATGGCCCTCCCTGTCACCGCCCTGCTGCTTCCGCTGGCTCTTCTGCTC |
| Full CAR | | CACGCCGCTCGGCCCGAAGTGCAATTGGTGGAAACTGGAGGAGGACTT |
| | | GTGCAACCTGGAGGATCATTGCGGCTCTCATGCGCTGTCTCCGGCTTC |
| | | GCCCTGTCAAATCACGGGATGTCGTGGGTCAGACGGGCCCCGGGAAAG |
| | | GGTCTGGAATGGGTGTCGGGGATTGTGTACAGCGGCTCCACCTACTAC |
| | | GCCGCTTCGGTCAAGGGCCGCTTCACTATTTCACGGGACAACAGCCGC |
| | | AACACCCTCTATCTGCAAATGAACTCTCTCCGCCCGGAGGATACCGCC |
| | | ATCTACTACTGCTCCGCACACGGCGGCGAATCCGACGTGTGGGGACAG |
| | | GGAACCACTGTCACCGTGTCGTCCGCATCCGGTGGCGGAGGATCGGGT |
| | | GGCCGGGCCTCCGGGGGCGGCGGCAGCGAGACTACCCTGACCCAGTCC |
| | | CCTGCCACTCTGTCCGTGAGCCCGGGAGAGAGAGCCACCCTTAGCTGC |
| | | CGGGCCAGCCAGAGCGTGGGCTCCAACCTGGCCTGGTACCAGCAGAAG |
| | | CCAGGACAGGGTCCCAGGCTGCTGATCTACGGAGCCTCCACTCGCGCG |
| | | ACCGGCATCCCCGCGAGGTTCTCCGGGTCGGGTTCCGGGACCGAGTTC |
| | | ACCCTGACCATCTCCTCCCTCCAACCGGAGGACTTCGCGGTGTACTAC |
| | | TGTCAGCAGTACAACGATTGGCTGCCCGTGACATTTGGACAGGGGACG |
| | | AAGGTGGAAATCAAAACCACTACCCCAGCACCGAGGCCACCCACCCCG |
| | | GCTCCTACCATCGCCTCCCAGCCTCTGTCCCTGCGTCCGGAGGCATGT |
| | | AGACCCGCAGCTGGTGGGGCCGTGCATACCCGGGGTCTTGACTTCGCC |
| | | TGCGATATCTACATTTGGGCCCCTCTGGCTGGTACTTGCGGGGTCCTG |
| | | CTGCTTTCACTCGTGATCACTCTTTACTGTAAGCGCGGTCGGAAGAAG |
| | | CTGCTGTACATCTTTAAGCAACCCTTCATGAGGCCTGTGCAGACTACT |
| | | CAAGAGGAGGACGGCTGTTCATGCCGGTTCCCAGAGGAGGAGGAAGGC |
| | | GGCTGCGAACTGCGCGTGAAATTCAGCCGCAGCGCAGATGCTCCAGCC |
| | | TACAAGCAGGGGCAGAACCAGCTCTACAACGAACTCAATCTTGGTCGG |
| | | AGAGAGGAGTACGACGTGCTGGACAAGCGGAGAGGACGGGACCCAGAA |
| | | ATGGGCGGGAAGCCGCGCAGAAAGAATCCCCAAGAGGGCCTGTACAAC |
| | | GAGCTCCAAAAGGATAAGATGGCAGAAGCCTATAGCGAGATTGGTATG |
| | | AAAGGGGAACGCAGAAGAGGCAAAGGCCACGACGGACTGTACCAGGGA |
| | | CTCAGCACCGCCACCAAGGACACCTATGACGCTCTTCACATGCAGGCC |
| | | CTGCCGCCTCGG |

139114

| | | |
|---|---|---|
| 139114-aa | 1051 | EVQLVESGGGLVQPGGSLRLSCAVSGFALSNHGMSWVRRAPGKGLEWV |
| ScFv | | SGIVYSGSTYYAASVKGRFTISRDNSRNTLYLQMNSLRPEDTAIYYCS |
| domain | | AHGGESDVWGQGTTVTVSSASGGGGSGGRASGGGGSEIVLTQSPGTLS |
| | | LSPGERATLSCRASQSIGSSSLAWYQQKPGQAPRLLMYGASSRASGIP |
| | | DRFSGSGSGTDFTLTISRLEPEDFAVYYCQQYAGSPPFTFGQGTKVEI |
| | | K |
| 139114-nt | 1052 | GAAGTGCAATTGGTGGAATCTGGTGGAGGACTTGTGCAACCTGGAGGA |
| ScFv | | TCACTGAGACTGTCATGCGCGGTGTCCGGTTTTGCCCTGAGCAATCAT |
| domain | | GGGATGTCGTGGGTCCGGCGCGCCCCCGGAAAGGGTCTGGAATGGGTG |
| | | TCGGGTATCGTCTACTCCGGGAGCACTTACTACGCCGCGAGCGTGAAG |
| | | GGCCGCTTCACCATTTCCCGCGATAACTCCCGCAACACCCTGTACTTG |
| | | CAAATGAACTCGCTCCGGCCTGAGGACACTGCCATCTACTACTGCTCC |
| | | GCACACGGAGGAGAATCCGACGTGTGGGGCCAGGGAACTACCGTGACC |
| | | GTCAGCAGCGCCTCCGGCGGCGGGGGCTCAGGCGGACGGGCTAGCGGC |
| | | GGCGGTGGCTCCGAGATCGTGCTGACCCAGTCGCCTGGCACTCTCTCG |
| | | CTGAGCCCCGGGGAAAGGGCAACCCTGTCCTGTCGGGCCAGCCAGTCC |
| | | ATTGGATCATCCTCCCTCGCCTGGTATCAGCAGAAACCGGGACAGGCT |
| | | CCGCGGCTGCTTATGTATGGGGCCAGCTCAAGAGCCTCCGGCATTCCC |
| | | GACCGGTTCTCCGGGTCCGGTTCCGGCACCGATTTCACCCTGACTATC |
| | | TCGAGGCTGGAGCCAGAGGACTTCGCCGTGTACTACTGCCAGCAGTAC |
| | | GCGGGGTCCCCGCCGTTCACGTTCGGACAGGGAACCAAGGTCGAGATC |
| | | AAG |
| 139114-aa | 1053 | EVQLVESGGGLVQPGGSLRLSCAVSGFALSNHGMSWVRRAPGKGLEWV |
| VH | | SGIVYSGSTYYAASVKGRFTISRDNSRNTLYLQMNSLRPEDTAIYYCS |
| | | AHGGESDVWGQGTTVTVSS |
| 139114-aa | 1054 | EIVLTQSPGTLSLSPGERATLSCRASQSIGSSSLAWYQQKPGQAPRLL |
| VL | | MYGASSRASGIPDRFSGSGSGTDFTLTISRLEPEDFAVYYCQQYAGSP |
| | | PFTFGQGTKVEIK |
| 139114-aa | 1055 | MALPVTALLLPLALLLHAARPEVQLVESGGGLVQPGGSLRLSCAVSGF |
| Full CAR | | ALSNHGMSWVRRAPGKGLEWVSGIVYSGSTYYAASVKGRFTISRDNSR |
| | | NTLYLQMNSLRPEDTAIYYCSAHGGESDVWGQGTTVTVSSASGGGGSG |
| | | GRASGGGGSEIVLTQSPGTLSLSPGERATLSCRASQSIGSSSLAWYQQ |
| | | KPGQAPRLLMYGASSRASGIPDRFSGSGSGTDFTLTISRLEPEDFAVY |
| | | YCQQYAGSPPFTFGQGTKVEIKTTTPAPRPPTPAPTIASQPLSLRPEA |
| | | CRPAAGGAVHTRGLDFACDIYIWAPLAGTCGVLLLSLVITLYCKRGRK |
| | | KLLYIFKQPFMRPVQTTQEEDGCSCRFPEEEEGGCELRVKFSRSADAP |
| | | AYKQGQNQLYNELNLGRREEYDVLDKRRGRDPEMGGKPRRKNPQEGLY |
| | | NELQKDKMAEAYSEIGMKGERRRGKGHDGLYQGLSTATKDTYDALHMQ |
| | | ALPPR |
| 139114-nt | 1056 | ATGGCCCTCCCTGTCACCGCCCTGCTGCTTCCGCTGGCTCTTCTGCTC |
| Full CAR | | CACGCCGCTCGGCCCGAAGTGCAATTGGTGGAATCTGGTGGAGGACTT |
| | | GTGCAACCTGGAGGATCACTGAGACTGTCATGCGCGGTGTCCGGTTTT |
| | | GCCCTGAGCAATCATGGGATGTCGTGGGTCCGGCGCGCCCCCGGAAAG |
| | | GGTCTGGAATGGGTGTCGGGTATCGTCTACTCCGGGAGCACTTACTAC |
| | | GCCGCGAGCGTGAAGGGCCGCTTCACCATTTCCCGCGATAACTCCCGC |
| | | AACACCCTGTACTTGCAAATGAACTCGCTCCGGCCTGAGGACACTGCC |
| | | ATCTACTACTGCTCCGCACACGGAGGAGAATCCGACGTGTGGGGCCAG |
| | | GGAACTACCGTGACCGTCAGCAGCGCCTCCGGCGGCGGGGGCTCAGGC |
| | | GGACGGGCTAGCGGCGGCGGTGGCTCCGAGATCGTGCTGACCCAGTCG |
| | | CCTGGCACTCTCTCGCTGAGCCCCGGGGAAAGGGCAACCCTGTCCTGT |
| | | CGGGCCAGCCAGTCCATTGGATCATCCTCCCTCGCCTGGTATCAGCAG |
| | | AAACCGGGACAGGCTCCGCGGCTGCTTATGTATGGGGCCAGCTCAAGA |
| | | GCCTCCGGCATTCCCGACCGGTTCTCCGGGTCCGGTTCCGGCACCGAT |
| | | TTCACCCTGACTATCTCGAGGCTGGAGCCAGAGGACTTCGCCGTGTAC |
| | | TACTGCCAGCAGTACGCGGGGTCCCCGCCGTTCACGTTCGGACAGGGA |
| | | ACCAAGGTCGAGATCAAGACCACTACCCCAGCACCGAGGCCACCCACC |
| | | CCGGCTCCTACCATCGCCTCCCAGCCTCTGTCCCTGCGTCCGGAGGCA |
| | | TGTAGACCCGCAGCTGGTGGGGCCGTGCATACCCGGGGTCTTGACTTC |
| | | GCCTGCGATATCTACATTTGGGCCCCTCTGGCTGGTACTTGCGGGGTC |
| | | CTGCTGCTTTCACTCGTGATCACTCTTTACTGTAAGCGCGGTCGGAAG |
| | | AAGCTGCTGTACATCTTTAAGCAACCCTTCATGAGGCCTGTGCAGACT |
| | | ACTCAAGAGGAGGACGGCTGTTCATGCCGGTTCCCAGAGGAGGAGGAA |
| | | GGCGGCTGCGAACTGCGCGTGAAATTCAGCCGCAGCGCAGATGCTCCA |
| | | GCCTACAAGCAGGGGCAGAACCAGCTCTACAACGAACTCAATCTTGGT |
| | | CGGAGAGAGGAGTACGACGTGCTGGACAAGCGGAGAGGACGGGACCCA |
| | | GAAATGGGCGGGAAGCCGCGCAGAAAGAATCCCCAAGAGGGCCTGTAC |
| | | AACGAGCTCCAAAAGGATAAGATGGCAGAAGCCTATAGCGAGATTGGT |
| | | ATGAAAGGGGAACGCAGAAGAGGCAAAGGCCACGACGGACTGTACCAG |
| | | GGACTCAGCACCGCCACCAAGGACACCTATGACGCTCTTCACATGCAG |
| | | GCCCTGCCGCCTCGG |

149362

| | | |
|---|---|---|
| 149362-aa | 1057 | QVQLQESGPGLVKPSETLSLTCTVSGGSISSSYYYWGWIRQPPGKGLE |
| ScFv | | WIGSIYYSGSAYYNPSLKSRVTISVDTSKNQFSLRLSSVTAADTAVYY |
| domain | | CARHWQEWPDAFDIWGQGTMVTVSSGGGGSGGGGSGGGGSETTLTQSP |
| | | AFMSATPGDKVIISCKASQDIDDAMNWYQQKPGEAPLFIIQSATSPVP |
| | | GIPPRFSGSGFGTDFSLTINNIESEDAAYYFCLQHDNFPLTFGQGTKL |
| | | EIK |
| 149362-nt | 1058 | CAAGTGCAGCTTCAGGAAAGCGGACCGGGCCTGGTCAAGCCATCCGAA |
| ScFv | | ACTCTCTCCCTGACTTGCACTGTGTCTGGCGGTTCCATCTCATCGTCG |
| domain | | TACTACTACTGGGGCTGGATTAGGCAGCCGCCCGGAAAGGGACTGGAG |
| | | TGGATCGGAAGCATCTACTATTCCGGCTCGGCGTACTACAACCCTAGC |
| | | CTCAAGTCGAGAGTGACCATCTCCGTGGATACCTCCAAGAACCAGTTT |
| | | TCCCTGCGCCTGAGCTCCGTGACCGCCGCTGACACCGCCGTGTACTAC |
| | | TGTGCTCGGCATTGGCAGGAATGGCCCGATGCCTTCGACATTTGGGGC |
| | | CAGGGCACTATGGTCACTGTGTCATCCGGGGGTGGAGGCAGCGGGGGA |
| | | GGAGGGTCCGGGGGGGGAGGTTCAGAGACAACCTTGACCCAGTCACCC |
| | | GCATTCATGTCCGCCACTCCGGGAGACAAGGTCATCATCTCGTGCAAA |
| | | GCGTCCCAGGATATCGACGATGCCATGAATTGGTACCAGCAGAAGCCT |
| | | GGCGAAGCGCCGCTGTTCATTATCCAATCCGCAACCTCGCCCGTGCCT |
| | | GGAATCCCACCGCGGTTCAGCGGCAGCGGTTTCGGAACCGACTTTTCC |
| | | CTGACCATTAACAACATTGAGTCCGAGGACGCCGCCTACTACTTCTGC |
| | | CTGCAACACGACAACTTCCCTCTCACGTTCGGCCAGGGAACCAAGCTG |
| | | GAAATCAAG |
| 149362-aa | 1059 | QVQLQESGPGLVKPSETLSLTCTVSGGSISSSYYYWGWIRQPPGKGLE |
| VH | | WIGSIYYSGSAYYNPSLKSRVTISVDTSKNQFSLRLSSVTAADTAVYY |
| | | CARHWQEWPDAFDIWGQGTMVTVSS |
| 149362-aa | 1060 | ETTLTQSPAFMSATPGDKVIISCKASQDIDDAMNWYQQKPGEAPLFII |
| VL | | QSATSPVPGIPPRFSGSGFGTDESLTINNIESEDAAYYFCLQHDNEPL |
| | | TFGQGTKLEIK |
| 149362-aa | 1061 | MALPVTALLLPLALLLHAARPQVQLQESGPGLVKPSETLSLTCTVSGG |
| Full CAR | | SISSSYYYWGWIRQPPGKGLEWIGSIYYSGSAYYNPSLKSRVTISVDT |
| | | SKNQFSLRLSSVTAADTAVYYCARHWQEWPDAFDIWGQGTMVTVSSGG |
| | | GGSGGGGSGGGGSETTLTQSPAFMSATPGDKVIISCKASQDIDDAMNW |
| | | YQQKPGEAPLFIIQSATSPVPGIPPRFSGSGFGTDFSLTINNIESEDA |
| | | AYYFCLQHDNFPLTFGQGTKLEIKTTTPAPRPPTPAPTIASQPLSLRP |
| | | EACRPAAGGAVHTRGLDFACDIYIWAPLAGTCGVLLLSLVITLYCKRG |
| | | RKKLLYIFKQPFMRPVQTTQEEDGCSCRFPEEEEGGCELRVKFSRSAD |
| | | APAYKQGQNQLYNELNLGRREEYDVLDKRRGRDPEMGGKPRRKNPQEG |
| | | LYNELQKDKMAEAYSEIGMKGERRRGKGHDGLYQGLSTATKDTYDALH |
| | | MQALPPR |
| 149362-nt | 1062 | ATGGCCCTCCCTGTCACCGCCCTGCTGCTTCCGCTGGCTCTTCTGCTC |
| Full CAR | | CACGCCGCTCGGCCCCAAGTGCAGCTTCAGGAAAGCGGACCGGGCCTG |
| | | GTCAAGCCATCCGAAACTCTCTCCCTGACTTGCACTGTGTCTGGCGGT |
| | | TCCATCTCATCGTCGTACTACTACTGGGGCTGGATTAGGCAGCCGCCC |
| | | GGAAAGGGACTGGAGTGGATCGGAAGCATCTACTATTCCGGCTCGGCG |
| | | TACTACAACCCTAGCCTCAAGTCGAGAGTGACCATCTCCGTGGATACC |
| | | TCCAAGAACCAGTTTTCCCTGCGCCTGAGCTCCGTGACCGCCGCTGAC |
| | | ACCGCCGTGTACTACTGTGCTCGGCATTGGCAGGAATGGCCCGATGCC |
| | | TTCGACATTTGGGGCCAGGGCACTATGGTCACTGTGTCATCCGGGGGT |
| | | GGAGGCAGCGGGGGAGGAGGGTCCGGGGGGGGAGGTTCAGAGACAACC |
| | | TTGACCCAGTCACCCGCATTCATGTCCGCCACTCCGGGAGACAAGGTC |
| | | ATCATCTCGTGCAAAGCGTCCCAGGATATCGACGATGCCATGAATTGG |
| | | TACCAGCAGAAGCCTGGCGAAGCGCCGCTGTTCATTATCCAATCCGCA |
| | | ACCTCGCCCGTGCCTGGAATCCCACCGCGGTTCAGCGGCAGCGGTTTC |
| | | GGAACCGACTTTTCCCTGACCATTAACAACATTGAGTCCGAGGACGCC |
| | | GCCTACTACTTCTGCCTGCAACACGACAACTTCCCTCTCACGTTCGGC |
| | | CAGGGAACCAAGCTGGAAATCAAGACCACTACCCCAGCACCGAGGCCA |
| | | CCCACCCCGGCTCCTACCATCGCCTCCCAGCCTCTGTCCCTGCGTCCG |
| | | GAGGCATGTAGACCCGCAGCTGGTGGGGCCGTGCATACCCGGGGTCTT |
| | | GACTTCGCCTGCGATATCTACATTTGGGCCCCTCTGGCTGGTACTTGC |
| | | GGGGTCCTGCTGCTTTCACTCGTGATCACTCTTTACTGTAAGCGCGGT |
| | | CGGAAGAAGCTGCTGTACATCTTTAAGCAACCCTTCATGAGGCCTGTG |
| | | CAGACTACTCAAGAGGAGGACGGCTGTTCATGCCGGTTCCCAGAGGAG |
| | | GAGGAAGGCGGCTGCGAACTGCGCGTGAAATTCAGCCGCAGCGCAGAT |
| | | GCTCCAGCCTACAAGCAGGGGCAGAACCAGCTCTACAACGAACTCAAT |
| | | CTTGGTCGGAGAGAGGAGTACGACGTGCTGGACAAGCGGAGAGGACGG |
| | | GACCCAGAAATGGGGGGAAGCCGCGCAGAAAGAATCCCCAAGAGGGC |
| | | CTGTACAACGAGCTCCAAAAGGATAAGATGGCAGAAGCCTATAGCGAG |
| | | ATTGGTATGAAAGGGGAACGCAGAAGAGGCAAAGGCCACGACGGACTG |
| | | TACCAGGGACTCAGCACCGCCACCAAGGACACCTATGACGCTCTTCAC |
| | | ATGCAGGCCCTGCCGCCTCGG |

149363

| | | |
|---|---|---|
| 149363-aa | 1063 | VNLRESGPALVKPTQTLTLTCTFSGFSLRTSGMCVSWIRQPPGKALEW |
| ScFv | | LARIDWDEDKFYSTSLKTRLTISKDTSDNQVVLRMTNMDPADTATYYC |
| domain | | ARSGAGGTSATAFDIWGPGTMVTVSSGGGGSGGGGSGGGGSDIQMTQS |
| | | PSSLSASVGDRVTITCRASQDIYNNLAWFQLKPGSAPRSLMYAANKSQ |
| | | SGVPSRFSGSASGTDFTLTISSLQPEDFATYYCQHYYRFPYSFGQGTK |
| | | LEIK |
| 149363-nt | 1064 | CAAGTCAATCTGCGCGAATCCGGCCCCGCCTTGGTCAAGCCTACCCAG |
| ScFv | | ACCCTCACTCTGACCTGTACTTTCTCCGGCTTCTCCCTGCGGACTTCC |
| domain | | GGGATGTGCGTGTCCTGGATCAGACAGCCTCCGGGAAAGGCCCTGGAG |
| | | TGGCTCGCTCGCATTGACTGGGATGAGGACAAGTTCTACTCCACCTCA |
| | | CTCAAGACCAGGCTGACCATCAGCAAAGATACCTCTGACAACCAAGTG |
| | | GTGCTCCGCATGACCAACATGGACCCAGCCGACACTGCCACTTACTAC |
| | | TGCGCGAGGAGCGGAGCGGGCGGAACCTCCGCCACCGCCTTCGATATT |
| | | TGGGGCCCGGGTACCATGGTCACCGTGTCAAGCGGAGGAGGGGGGTCC |
| | | GGGGGCGGCGGTTCCGGGGGAGGCGGATCGGACATTCAGATGACTCAG |
| | | TCACCATCGTCCCTGAGCGCTAGCGTGGGCGACAGAGTGACAATCACT |
| | | TGCCGGGCATCCCAGGACATCTATAACAACCTTGCGTGGTTCCAGCTG |
| | | AAGCCTGGTTCCGCACCGCGGTCACTTATGTACGCCGCCAACAAGAGC |
| | | CAGTCGGGAGTGCCGTCCCGGTTTTCCGGTTCGGCCTCGGGAACTGAC |
| | | TTCACCCTGACGATCTCCAGCCTGCAACCCGAGGATTTCGCCACCTAC |
| | | TACTGCCAGCACTACTACCGCTTTCCCTACTCGTTCGGACAGGGAACC |
| | | AAGCTGGAAATCAAG |
| 149363-aa | 1065 | QVNLRESGPALVKPTQTLTLTCTFSGFSLRTSGMCVSWIRQPPGKALE |
| VH | | WLARIDWDEDKFYSTSLKTRLTISKDTSDNQVVLRMTNMDPADTATYY |
| | | CARSGAGGTSATAFDIWGPGTMVTVSS |
| 149363-aa | 1066 | DIQMTQSPSSLSASVGDRVTITCRASQDIYNNLAWFQLKPGSAPRSLM |
| VL | | YAANKSQSGVPSRFSGSASGTDFTLTISSLQPEDFATYYCQHYYRFPY |
| | | SFGQGTKLEIK |
| 149363-aa | 1067 | MALPVTALLLPLALLLHAARPQVNLRESGPALVKPTQTLTLTCTESGF |
| Full CAR | | SLRTSGMCVSWIRQPPGKALEWLARIDWDEDKFYSTSLKTRLTISKDT |
| | | SDNQVVLRMTNMDPADTATYYCARSGAGGTSATAFDIWGPGTMVTVSS |
| | | GGGGSGGGGSGGGGSDIQMTQSPSSLSASVGDRVTITCRASQDIYNNL |
| | | AWFQLKPGSAPRSLMYAANKSQSGVPSRESGSASGTDFTLTISSLQPE |
| | | DFATYYCQHYYRFPYSFGQGTKLEIKTTTPAPRPPTPAPTIASQPLSL |
| | | RPEACRPAAGGAVHTRGLDFACDIYIWAPLAGTCGVLLLSLVITLYCK |
| | | RGRKKLLYIFKQPFMRPVQTTQEEDGCSCRFPEEEEGGCELRVKFSRS |
| | | ADAPAYKQGQNQLYNELNLGRREEYDVLDKRRGRDPEMGGKPRRKNPQ |
| | | EGLYNELQKDKMAEAYSEIGMKGERRRGKGHDGLYQGLSTATKDTYDA |
| | | LHMQALPPR |
| 149363-nt | 1068 | ATGGCCCTCCCTGTCACCGCCCTGCTGCTTCCGCTGGCTCTTCTGCTC |
| Full CAR | | CACGCCGCTCGGCCCCAAGTCAATCTGCGCGAATCCGGCCCCGCCTTG |
| | | GTCAAGCCTACCCAGACCCTCACTCTGACCTGTACTTTCTCCGGCTTC |
| | | TCCCTGCGGACTTCCGGGATGTGCGTGTCCTGGATCAGACAGCCTCCG |
| | | GGAAAGGCCCTGGAGTGGCTCGCTCGCATTGACTGGGATGAGGACAAG |
| | | TTCTACTCCACCTCACTCAAGACCAGGCTGACCATCAGCAAAGATACC |
| | | TCTGACAACCAAGTGGTGCTCCGCATGACCAACATGGACCCAGCCGAC |
| | | ACTGCCACTTACTACTGCGCGAGGAGCGGAGCGGGCGGAACCTCCGCC |
| | | ACCGCCTTCGATATTTGGGGCCCGGGTACCATGGTCACCGTGTCAAGC |
| | | GGAGGAGGGGGGTCCGGGGGCGGCGGTTCCGGGGGAGGCGGATCGGAC |
| | | ATTCAGATGACTCAGTCACCATCGTCCCTGAGCGCTAGCGTGGGCGAC |
| | | AGAGTGACAATCACTTGCCGGGCATCCCAGGACATCTATAACAACCTT |
| | | GCGTGGTTCCAGCTGAAGCCTGGTTCCGCACCGCGGTCACTTATGTAC |
| | | GCCGCCAACAAGAGCCAGTCGGGAGTGCCGTCCCGGTTTTCCGGTTCG |
| | | GCCTCGGGAACTGACTTCACCCTGACGATCTCCAGCCTGCAACCCGAG |
| | | GATTTCGCCACCTACTACTGCCAGCACTACTACCGCTTTCCCTACTCG |
| | | TTCGGACAGGGAACCAAGCTGGAAATCAAGACCACTACCCCAGCACCG |
| | | AGGCCACCCACCCCGGCTCCTACCATCGCCTCCCAGCCTCTGTCCCTG |
| | | CGTCCGGAGGCATGTAGACCCGCAGCTGGTGGGGCCGTGCATACCCGG |
| | | GGTCTTGACTTCGCCTGCGATATCTACATTTGGGCCCCTCTGGCTGGT |
| | | ACTTGCGGGGTCCTGCTGCTTTCACTCGTGATCACTCTTTACTGTAAG |
| | | CGCGGTCGGAAGAAGCTGCTGTACATCTTTAAGCAACCCTTCATGAGG |
| | | CCTGTGCAGACTACTCAAGAGGAGGACGGCTGTTCATGCCGGTTCCCA |
| | | GAGGAGGAGGAAGGCGGCTGCGAACTGCGCGTGAAATTCAGCCGCAGC |
| | | GCAGATGCTCCAGCCTACAAGCAGGGGCAGAACCAGCTCTACAACGAA |
| | | CTCAATCTTGGTCGGAGAGAGGAGTACGACGTGCTGGACAAGCGGAGA |
| | | GGACGGGACCCAGAAATGGGCGGGAAGCCGCGCAGAAAGAATCCCCAA |
| | | GAGGGCCTGTACAACGAGCTCCAAAAGGATAAGATGGCAGAAGCCTAT |
| | | AGCGAGATTGGTATGAAAGGGGAACGCAGAAGAGGCAAAGGCCACGAC |
| | | GGACTGTACCAGGGACTCAGCACCGCCACCAAGGACACCTATGACGCT |
| | | CTTCACATGCAGGCCCTGCCGCCTCGG |

149364

| | | |
|---|---|---|
| 149364-aa | 1069 | EVQLVESGGGLVKPGGSLRLSCAASGFTFSSYSMNWVRQAPGKGLEWV |
| ScFv | | SSISSSSSYIYYADSVKGRFTISRDNAKNSLYLQMNSLRAEDTAVYYC |
| domain | | AKTIAAVYAFDIWGQGTTVTVSSGGGGSGGGGSGGGGSEIVLTQSPLS |
| | | LPVTPEEPASISCRSSQSLLHSNGYNYLDWYLQKPGQSPQLLIYLGSN |
| | | RASGVPDRFSGSGSGTDFTLKISRVEAEDVGVYYCMQALQTPYTFGQG |
| | | TKLEIK |
| 149364-nt | 1070 | GAAGTGCAGCTTGTCGAATCCGGGGGGGGACTGGTCAAGCCGGGCGGA |
| ScFv | | TCACTGAGACTGTCCTGCGCCGCGAGCGGCTTCACGTTCTCCTCCTAC |
| domain | | TCCATGAACTGGGTCCGCCAAGCCCCCGGGAAGGGACTGGAATGGGTG |
| | | TCCTCTATCTCCTCGTCGTCGTCCTACATCTACTACGCCGACTCCGTG |
| | | AAGGGAAGATTCACCATTTCCCGCGACAACGCAAAGAACTCACTGTAC |
| | | TTGCAAATGAACTCACTCCGGGCCGAAGATACTGCTGTGTACTATTGC |
| | | GCCAAGACTATTGCCGCCGTCTACGCTTTCGACATCTGGGGCCAGGGA |
| | | ACCACCGTGACTGTGTCGTCCGGTGGTGGTGGCTCGGGCGGAGGAGGA |
| | | AGCGGCGGCGGGGGGTCCGAGATTGTGCTGACCCAGTCGCCACTGAGC |
| | | CTCCCTGTGACCCCCGAGGAACCCGCCAGCATCAGCTGCCGGTCCAGC |
| | | CAGTCCCTGCTCCACTCCAACGGATACAATTACCTCGATTGGTACCTT |
| | | CAGAAGCCTGGACAAAGCCCGCAGCTGCTCATCTACTTGGGATCAAAC |
| | | CGCGCGTCAGGAGTGCCTGACCGGTTCTCCGGCTCGGGCAGCGGTACC |
| | | GATTTCACCCTGAAAATCTCCAGGGTGGAGGCAGAGGACGTGGGAGTG |
| | | TATTACTGTATGCAGGCGCTGCAGACTCCGTACACATTTGGGCAGGGC |
| | | ACCAAGCTGGAGATCAAG |
| 149364-aa | 1071 | EVQLVESGGGLVKPGGSLRLSCAASGFTFSSYSMNWVRQAPGKGLEWV |
| VH | | SSISSSSSYIYYADSVKGRFTISRDNAKNSLYLQMNSLRAEDTAVYYC |
| | | AKTIAAVYAFDIWGQGTTVTVSS |
| 149364-aa | 1072 | EIVLTQSPLSLPVTPEEPASISCRSSQSLLHSNGYNYLDWYLQKPGQS |
| VL | | PQLLIYLGSNRASGVPDRFSGSGSGTDFTLKISRVEAEDVGVYYCMQA |
| | | LQTPYTFGQGTKLEIK |
| 149364-aa | 1073 | MALPVTALLLPLALLLHAARPEVQLVESGGGLVKPGGSLRLSCAASGF |
| Full CAR | | TFSSYSMNWVRQAPGKGLEWVSSISSSSSYIYYADSVKGRFTISRDNA |
| | | KNSLYLQMNSLRAEDTAVYYCAKTIAAVYAFDIWGQGTTVTVSSGGGG |
| | | SGGGGSGGGGSEIVLTQSPLSLPVTPEEPASISCRSSQSLLHSNGYNY |
| | | LDWYLQKPGQSPQLLIYLGSNRASGVPDRFSGSGSGTDFTLKISRVEA |
| | | EDVGVYYCMQALQTPYTFGQGTKLEIKTTTPAPRPPTPAPTIASQPLS |
| | | LRPEACRPAAGGAVHTRGLDFACDIYIWAPLAGTCGVLLLSLVITLYC |
| | | KRGRKKLLYIFKQPFMRPVQTTQEEDGCSCRFPEEEEGGCELRVKFSR |
| | | SADAPAYKQGQNQLYNELNLGRREEYDVLDKRRGRDPEMGGKPRRKNP |
| | | QEGLYNELQKDKMAEAYSEIGMKGERRRGKGHDGLYQGLSTATKDTYD |
| | | ALHMQALPPR |
| 149364-nt | 1074 | ATGGCCCTCCCTGTCACCGCCCTGCTGCTTCCGCTGGCTCTTCTGCTC |
| Full CAR | | CACGCCGCTCGGCCCGAAGTGCAGCTTGTCGAATCCGGGGGGGGACTG |
| | | GTCAAGCCGGGCGGATCACTGAGACTGTCCTGCGCCGCGAGCGGCTTC |
| | | ACGTTCTCCTCCTACTCCATGAACTGGGTCCGCCAAGCCCCCGGGAAG |
| | | GGACTGGAATGGGTGTCCTCTATCTCCTCGTCGTCGTCCTACATCTAC |
| | | TACGCCGACTCCGTGAAGGGAAGATTCACCATTTCCCGCGACAACGCA |
| | | AAGAACTCACTGTACTTGCAAATGAACTCACTCCGGGCCGAAGATACT |
| | | GCTGTGTACTATTGCGCCAAGACTATTGCCGCCGTCTACGCTTTCGAC |
| | | ATCTGGGGCCAGGGAACCACCGTGACTGTGTCGTCCGGTGGTGGTGGC |
| | | TCGGGCGGAGGAGGAAGCGGCGGCGGGGGGTCCGAGATTGTGCTGACC |
| | | CAGTCGCCACTGAGCCTCCCTGTGACCCCCGAGGAACCCGCCAGCATC |
| | | AGCTGCCGGTCCAGCCAGTCCCTGCTCCACTCCAACGGATACAATTAC |
| | | CTCGATTGGTACCTTCAGAAGCCTGGACAAAGCCCGCAGCTGCTCATC |
| | | TACTTGGGATCAAACCGCGCGTCAGGAGTGCCTGACCGGTTCTCCGGC |
| | | TCGGGCAGCGGTACCGATTTCACCCTGAAAATCTCCAGGGTGGAGGCA |
| | | GAGGACGTGGGAGTGTATTACTGTATGCAGGCGCTGCAGACTCCGTAC |
| | | ACATTTGGGCAGGGCACCAAGCTGGAGATCAAGACCACTACCCCAGCA |
| | | CCGAGGCCACCCACCCCGGCTCCTACCATCGCCTCCCAGCCTCTGTCC |
| | | CTGCGTCCGGAGGCATGTAGACCCGCAGCTGGTGGGGCCGTGCATACC |
| | | CGGGGTCTTGACTTCGCCTGCGATATCTACATTTGGGCCCCTCTGGCT |
| | | GGTACTTGCGGGGTCCTGCTGCTTTCACTCGTGATCACTCTTTACTGT |
| | | AAGCGCGGTCGGAAGAAGCTGCTGTACATCTTTAAGCAACCCTTCATG |
| | | AGGCCTGTGCAGACTACTCAAGAGGAGGACGGCTGTTCATGCCGGTTC |
| | | CCAGAGGAGGAGGAAGGCGGCTGCGAACTGCGCGTGAAATTCAGCCGC |
| | | AGCGCAGATGCTCCAGCCTACAAGCAGGGGCAGAACCAGCTCTACAAC |
| | | GAACTCAATCTTGGTCGGAGAGAGGAGTACGACGTGCTGGACAAGCGG |
| | | AGAGGACGGGACCCAGAAATGGGCGGGAAGCCGCGCAGAAAGAATCCC |
| | | CAAGAGGGCCTGTACAACGAGCTCCAAAAGGATAAGATGGCAGAAGCC |
| | | TATAGCGAGATTGGTATGAAAGGGGAACGCAGAAGAGGCAAAGGCCAC |
| | | GACGGACTGTACCAGGGACTCAGCACCGCCACCAAGGACACCTATGAC |
| | | GCTCTTCACATGCAGGCCCTGCCGCCTCGG |

149365

| | | |
|---|---|---|
| 149365-aa | 1075 | EVQLVESGGGLVKPGGSLRLSCAASGFTFSDYYMSWIRQAPGKGLEWV |
| ScFv | | SYISSSGSTIYYADSVKGRFTISRDNAKNSLYLQMNSLRAEDTAVYYC |
| domain | | ARDLRGAFDIWGQGTMVTVSSGGGGSGGGGSGGGGSSYVLTQSPSVSA |
| | | APGYTATISCGGNNIGTKSVHWYQQKPGQAPLLVIRDDSVRPSKIPGR |
| | | FSGSNSGNMATLTISGVQAGDEADFYCQVWDSDSEHVVFGGGTKLTVL |
| 149365-nt | 1076 | GAAGTCCAGCTCGTGGAGTCCGGCGGAGGCCTTGTGAAGCCTGGAGGT |
| ScFv | | TCGCTGAGACTGTCCTGCGCCGCCTCCGGCTTCACCTTCTCCGACTAC |
| domain | | TACATGTCCTGGATCAGACAGGCCCCGGGAAAGGGCCTGGAATGGGTG |
| | | TCCTACATCTCGTCATCGGGCAGCACTATCTACTACGCGGACTCAGTG |
| | | AAGGGGCGGTTCACCATTTCCCGGGATAACGCGAAGAACTCGCTGTAT |
| | | CTGCAAATGAACTCACTGAGGGCCGAGGACACCGCCGTGTACTACTGC |
| | | GCCCGCGATCTCCGCGGGGCATTTGACATCTGGGGACAGGGAACCATG |
| | | GTCACAGTGTCCAGCGGAGGGGGAGGATCGGGTGGCGGAGGTTCCGGG |
| | | GGTGGAGGCTCCTCCTACGTGCTGACTCAGAGCCCAAGCGTCAGCGCT |
| | | GCGCCCGGTTACACGGCAACCATCTCCTGTGGCGGAAACAACATTGGG |
| | | ACCAAGTCTGTGCACTGGTATCAGCAGAAGCCGGGCCAAGCTCCCCTG |
| | | TTGGTGATCCGCGATGACTCCGTGCGGCCTAGCAAAATTCCGGGACGG |
| | | TTCTCCGGCTCCAACAGCGGCAATATGGCCACTCTCACCATCTCGGGA |
| | | GTGCAGGCCGGAGATGAAGCCGACTTCTACTGCCAAGTCTGGGACTCA |
| | | GACTCCGAGCATGTGGTGTTCGGGGGCGGAACCAAGCTGACTGTGCTC |
| 149365-aa | 1077 | EVQLVESGGGLVKPGGSLRLSCAASGFTFSDYYMSWIRQAPGKGLEWV |
| VH | | SYISSSGSTIYYADSVKGRFTISRDNAKNSLYLQMNSLRAEDTAVYYC |
| | | ARDLRGAFDIWGQGTMVTVSS |
| 149365-aa | 1078 | SYVLTQSPSVSAAPGYTATISCGGNNIGTKSVHWYQQKPGQAPLLVIR |
| VL | | DDSVRPSKIPGRFSGSNSGNMATLTISGVQAGDEADFYCQVWDSDSEH |
| | | VVFGGGTKLTVL |
| 149365-aa | 1079 | MALPVTALLLPLALLLHAARPEVQLVESGGGLVKPGGSLRLSCAASGF |
| Full CAR | | TFSDYYMSWIRQAPGKGLEWVSYISSSGSTIYYADSVKGRFTISRDNA |
| | | KNSLYLQMNSLRAEDTAVYYCARDLRGAFDIWGQGTMVTVSSGGGGSG |
| | | GGGSGGGGSSYVLTQSPSVSAAPGYTATISCGGNNIGTKSVHWYQQKP |
| | | GQAPLLVIRDDSVRPSKIPGRESGSNSGNMATLTISGVQAGDEADFYC |
| | | QVWDSDSEHVVFGGGTKLTVLTTTPAPRPPTPAPTIASQPLSLRPEAC |
| | | RPAAGGAVHTRGLDFACDIYIWAPLAGTCGVLLLSLVITLYCKRGRKK |
| | | LLYIFKQPFMRPVQTTQEEDGCSCRFPEEEEGGCELRVKFSRSADAPA |
| | | YKQGQNQLYNELNLGRREEYDVLDKRRGRDPEMGGKPRRKNPQEGLYN |
| | | ELQKDKMAEAYSEIGMKGERRRGKGHDGLYQGLSTATKDTYDALHMQA |
| | | LPPR |
| 149365-nt | 1080 | ATGGCCCTCCCTGTCACCGCCCTGCTGCTTCCGCTGGCTCTTCTGCTC |
| Full CAR | | CACGCCGCTCGGCCCGAAGTCCAGCTCGTGGAGTCCGGCGGAGGCCTT |
| | | GTGAAGCCTGGAGGTTCGCTGAGACTGTCCTGCGCCGCCTCCGGCTTC |
| | | ACCTTCTCCGACTACTACATGTCCTGGATCAGACAGGCCCCGGGAAAG |
| | | GGCCTGGAATGGGTGTCCTACATCTCGTCATCGGGCAGCACTATCTAC |
| | | TACGCGGACTCAGTGAAGGGGCGGTTCACCATTTCCCGGGATAACGCG |
| | | AAGAACTCGCTGTATCTGCAAATGAACTCACTGAGGGCCGAGGACACC |
| | | GCCGTGTACTACTGCGCCCGCGATCTCCGCGGGGCATTTGACATCTGG |
| | | GGACAGGGAACCATGGTCACAGTGTCCAGCGGAGGGGGAGGATCGGGT |
| | | GGCGGAGGTTCCGGGGGTGGAGGCTCCTCCTACGTGCTGACTCAGAGC |
| | | CCAAGCGTCAGCGCTGCGCCCGGTTACACGGCAACCATCTCCTGTGGC |
| | | GGAAACAACATTGGGACCAAGTCTGTGCACTGGTATCAGCAGAAGCCG |
| | | GGCCAAGCTCCCCTGTTGGTGATCCGCGATGACTCCGTGCGGCCTAGC |
| | | AAAATTCCGGGACGGTTCTCCGGCTCCAACAGCGGCAATATGGCCACT |
| | | CTCACCATCTCGGGAGTGCAGGCCGGAGATGAAGCCGACTTCTACTGC |
| | | CAAGTCTGGGACTCAGACTCCGAGCATGTGGTGTTCGGGGGCGGAACC |
| | | AAGCTGACTGTGCTCACCACTACCCCAGCACCGAGGCCACCCACCCCG |
| | | GCTCCTACCATCGCCTCCCAGCCTCTGTCCCTGCGTCCGGAGGCATGT |
| | | AGACCCGCAGCTGGTGGGGCCGTGCATACCCGGGGTCTTGACTTCGCC |
| | | TGCGATATCTACATTTGGGCCCCTCTGGCTGGTACTTGCGGGGTCCTG |
| | | CTGCTTTCACTCGTGATCACTCTTTACTGTAAGCGCGGTCGGAAGAAG |
| | | CTGCTGTACATCTTTAAGCAACCCTTCATGAGGCCTGTGCAGACTACT |
| | | CAAGAGGAGGACGGCTGTTCATGCCGGTTCCCAGAGGAGGAGGAAGGC |
| | | GGCTGCGAACTGCGCGTGAAATTCAGCCGCAGCGCAGATGCTCCAGCC |
| | | TACAAGCAGGGGCAGAACCAGCTCTACAACGAACTCAATCTTGGTCGG |
| | | AGAGAGGAGTACGACGTGCTGGACAAGCGGAGAGGACGGGACCCAGAA |
| | | ATGGGCGGGAAGCCGCGCAGAAAGAATCCCCAAGAGGGCCTGTACAAC |
| | | GAGCTCCAAAAGGATAAGATGGCAGAAGCCTATAGCGAGATTGGTATG |
| | | AAAGGGGAACGCAGAAGAGGCAAAGGCCACGACGGACTGTACCAGGGA |
| | | CTCAGCACCGCCACCAAGGACACCTATGACGCTCTTCACATGCAGGCC |
| | | CTGCCGCCTCGG |

149366

| | | |
|---|---|---|
| 149366-aa | 1081 | QVQLVQSGAEVKKPGASVKVSCKPSGYTVTSHYIHWVRRAPGQGLEWM |
| ScFv | | GMINPSGGVTAYSQTLQGRVTMTSDTSSSTVYMELSSLRSEDTAMYYC |
| domain | | AREGSGSGWYFDFWGRGTLVTVSSGGGGSGGGGSGGGGSSYVLTQPPS |
| | | VSVSPGQTASITCSGDGLSKKYVSWYQQKAGQSPVVLISRDKERPSGI |
| | | PDRFSGSNSADTATLTISGTQAMDEADYYCQAWDDTTVVFGGGTKLTV |
| | | L |
| 149366-nt | 1082 | CAAGTGCAGCTGGTGCAGAGCGGGGCCGAAGTCAAGAAGCCGGGAGCC |
| ScFv | | TCCGTGAAAGTGTCCTGCAAGCCTTCGGGATACACCGTGACCTCCCAC |
| domain | | TACATTCATTGGGTCCGCCGCGCCCCCGGCCAAGGACTCGAGTGGATG |
| | | GGCATGATCAACCCTAGCGGCGGAGTGACCGCGTACAGCCAGACGCTG |
| | | CAGGGACGCGTGACTATGACCTCGGATACCTCCTCCTCCACCGTCTAT |
| | | ATGGAACTGTCCAGCCTGCGGTCCGAGGATACCGCCATGTACTACTGC |
| | | GCCCGGGAAGGATCAGGCTCCGGGTGGTATTTCGACTTCTGGGGAAGA |
| | | GGCACCCTCGTGACTGTGTCATCTGGGGGAGGGGGTTCCGGTGGTGGC |
| | | GGATCGGGAGGAGGCGGTTCATCCTACGTGCTGACCCAGCCACCCTCC |
| | | GTGTCCGTGAGCCCCGGCCAGACTGCATCGATTACATGTAGCGGCGAC |
| | | GGCCTCTCCAAGAAATACGTGTCGTGGTACCAGCAGAAGGCCGGACAG |
| | | AGCCCGGTGGTGCTGATCTCAAGAGATAAGGAGCGGCCTAGCGGAATC |
| | | CCGGACAGGTTCTCGGGTTCCAACTCCGCGGACACTGCTACTCTGACC |
| | | ATCTCGGGGACCCAGGCTATGGACGAAGCCGATTACTACTGCCAAGCC |
| | | TGGGACGACACTACTGTCGTGTTTGGAGGGGGCACCAAGTTGACCGTC |
| | | CTT |
| 149366-aa | 1083 | QVQLVQSGAEVKKPGASVKVSCKPSGYTVTSHYIHWVRRAPGQGLEWM |
| VH | | GMINPSGGVTAYSQTLQGRVTMTSDTSSSTVYMELSSLRSEDTAMYYC |
| | | AREGSGSGWYFDFWGRGTLVTVSS |
| 149366-aa | 1084 | SYVLTQPPSVSVSPGQTASITCSGDGLSKKYVSWYQQKAGQSPVVLIS |
| VL | | RDKERPSGIPDRFSGSNSADTATLTISGTQAMDEADYYCQAWDDTTVV |
| | | FGGGTKLTVL |
| 149366-aa | 1085 | MALPVTALLLPLALLLHAARPQVQLVQSGAEVKKPGASVKVSCKPSGY |
| Full CAR | | TVTSHYIHWVRRAPGQGLEWMGMINPSGGVTAYSQTLQGRVTMTSDTS |
| | | SSTVYMELSSLRSEDTAMYYCAREGSGSGWYFDFWGRGTLVTVSSGGG |
| | | GSGGGGSGGGGSSYVLTQPPSVSVSPGQTASITCSGDGLSKKYVSWYQ |
| | | QKAGQSPVVLISRDKERPSGIPDRFSGSNSADTATLTISGTQAMDEAD |
| | | YYCQAWDDTTVVFGGGTKLTVLTTTPAPRPPTPAPTIASQPLSLRPEA |
| | | CRPAAGGAVHTRGLDFACDIYIWAPLAGTCGVLLLSLVITLYCKRGRK |
| | | KLLYIFKQPFMRPVQTTQEEDGCSCRFPEEEEGGCELRVKFSRSADAP |
| | | AYKQGQNQLYNELNLGRREEYDVLDKRRGRDPEMGGKPRRKNPQEGLY |
| | | NELQKDKMAEAYSEIGMKGERRRGKGHDGLYQGLSTATKDTYDALHMQ |
| | | ALPPR |
| 149366-nt | 1086 | ATGGCCCTCCCTGTCACCGCCCTGCTGCTTCCGCTGGCTCTTCTGCTC |
| Full CAR | | CACGCCGCTCGGCCCCAAGTGCAGCTGGTGCAGAGCGGGGCCGAAGTC |
| | | AAGAAGCCGGGAGCCTCCGTGAAAGTGTCCTGCAAGCCTTCGGGATAC |
| | | ACCGTGACCTCCCACTACATTCATTGGGTCCGCCGCGCCCCCGGCCAA |
| | | GGACTCGAGTGGATGGGCATGATCAACCCTAGCGGCGGAGTGACCGCG |
| | | TACAGCCAGACGCTGCAGGGACGCGTGACTATGACCTCGGATACCTCC |
| | | TCCTCCACCGTCTATATGGAACTGTCCAGCCTGCGGTCCGAGGATACC |
| | | GCCATGTACTACTGCGCCCGGGAAGGATCAGGCTCCGGGTGGTATTTC |
| | | GACTTCTGGGGAAGAGGCACCCTCGTGACTGTGTCATCTGGGGGAGGG |
| | | GGTTCCGGTGGTGGCGGATCGGGAGGAGGCGGTTCATCCTACGTGCTG |
| | | ACCCAGCCACCCTCCGTGTCCGTGAGCCCCGGCCAGACTGCATCGATT |
| | | ACATGTAGCGGCGACGGCCTCTCCAAGAAATACGTGTCGTGGTACCAG |
| | | CAGAAGGCCGGACAGAGCCCGGTGGTGCTGATCTCAAGAGATAAGGAG |
| | | CGGCCTAGCGGAATCCCGGACAGGTTCTCGGGTTCCAACTCCGCGGAC |
| | | ACTGCTACTCTGACCATCTCGGGGACCCAGGCTATGGACGAAGCCGAT |
| | | TACTACTGCCAAGCCTGGGACGACACTACTGTCGTGTTTGGAGGGGGC |
| | | ACCAAGTTGACCGTCCTTACCACTACCCCAGCACCGAGGCCACCCACC |
| | | CCGGCTCCTACCATCGCCTCCCAGCCTCTGTCCCTGCGTCCGGAGGCA |
| | | TGTAGACCCGCAGCTGGTGGGGCCGTGCATACCCGGGGTCTTGACTTC |
| | | GCCTGCGATATCTACATTTGGGCCCCTCTGGCTGGTACTTGCGGGGTC |
| | | CTGCTGCTTTCACTCGTGATCACTCTTTACTGTAAGCGCGGTCGGAAG |
| | | AAGCTGCTGTACATCTTTAAGCAACCCTTCATGAGGCCTGTGCAGACT |
| | | ACTCAAGAGGAGGACGGCTGTTCATGCCGGTTCCCAGAGGAGGAGGAA |
| | | GGCGGCTGCGAACTGCGCGTGAAATTCAGCCGCAGCGCAGATGCTCCA |
| | | GCCTACAAGCAGGGGCAGAACCAGCTCTACAACGAACTCAATCTTGGT |
| | | CGGAGAGAGGAGTACGACGTGCTGGACAAGCGGAGAGGACGGGACCCA |
| | | GAAATGGGCGGGAAGCCGCGCAGAAAGAATCCCCAAGAGGGCCTGTAC |
| | | AACGAGCTCCAAAAGGATAAGATGGCAGAAGCCTATAGCGAGATTGGT |
| | | ATGAAAGGGGAACGCAGAAGAGGCAAAGGCCACGACGGACTGTACCAG |
| | | GGACTCAGCACCGCCACCAAGGACACCTATGACGCTCTTCACATGCAG |
| | | GCCCTGCCGCCTCGG |

149367

| | | |
|---|---|---|
| 149367-aa | 1087 | QVQLQESGPGLVKPSQTLSLTCTVSGGSISSGGYYWSWIRQHPGKGLE |
| ScFv | | WIGYIYYSGSTYYNPSLKSRVTISVDTSKNQFSLKLSSVTAADTAVYY |
| domain | | CARAGIAARLRGAFDIWGQGTMVTVSSGGGGSGGGGSGGGGSDIVMTQ |
| | | SPSSVSASVGDRVIITCRASQGIRNWLAWYQQKPGKAPNLLIYAASNL |
| | | QSGVPSRFSGSGSGADFTLTISSLQPEDVATYYCQKYNSAPFTFGPGT |
| | | KVDIK |
| 149367-nt | 1088 | CAAGTGCAGCTTCAGGAGAGCGGCCCGGGACTCGTGAAGCCGTCCCAG |
| ScFv | | ACCCTGTCCCTGACTTGCACCGTGTCGGGAGGAAGCATCTCGAGCGGA |
| domain | | GGCTACTATTGGTCGTGGATTCGGCAGCACCCTGGAAAGGGCCTGGAA |
| | | TGGATCGGCTACATCTACTACTCCGGCTCGACCTACTACAACCCATCG |
| | | CTGAAGTCCAGAGTGACAATCTCAGTGGACACGTCCAAGAATCAGTTC |
| | | AGCCTGAAGCTCTCTTCCGTGACTGCGGCCGACACCGCCGTGTACTAC |
| | | TGCGCACGCGCTGGAATTGCCGCCCGGCTGAGGGGTGCCTTCGACATT |
| | | TGGGGACAGGGCACCATGGTCACCGTGTCCTCCGGCGGCGGAGGTTCC |
| | | GGGGGTGGAGGCTCAGGAGGAGGGGGGTCCGACATCGTCATGACTCAG |
| | | TCGCCCTCAAGCGTCAGCGCGTCCGTCGGGGACAGAGTGATCATCACC |
| | | TGTCGGGCGTCCCAGGGAATTCGCAACTGGCTGGCCTGGTATCAGCAG |
| | | AAGCCCGGAAAGGCCCCCAACCTGTTGATCTACGCCGCCTCAAACCTC |
| | | CAATCCGGGGTGCCGAGCCGCTTCAGCGGCTCCGGTTCGGGTGCCGAT |
| | | TTCACTCTGACCATCTCCTCCCTGCAACCTGAAGATGTGGCTACCTAC |
| | | TACTGCCAAAAGTACAACTCCGCACCTTTTACTTTCGGACCGGGGACC |
| | | AAAGTGGACATTAAG |
| 149367-aa | 1089 | QVQLQESGPGLVKPSQTLSLTCTVSGGSISSGGYYWSWIRQHPGKGLE |
| VH | | WIGYIYYSGSTYYNPSLKSRVTISVDTSKNQFSLKLSSVTAADTAVYY |
| | | CARAGIAARLRGAFDIWGQGTMVTVSS |
| 149367-aa | 1090 | DIVMTQSPSSVSASVGDRVIITCRASQGIRNWLAWYQQKPGKAPNLLI |
| VL | | YAASNLQSGVPSRFSGSGSGADFTLTISSLQPEDVATYYCQKYNSAPF |
| | | TFGPGTKVDIK |
| 149367-aa | 1091 | MALPVTALLLPLALLLHAARPQVQLQESGPGLVKPSQTLSLTCTVSGG |
| Full CAR | | SISSGGYYWSWIRQHPGKGLEWIGYIYYSGSTYYNPSLKSRVTISVDT |
| | | SKNQFSLKLSSVTAADTAVYYCARAGIAARLRGAFDIWGQGTMVTVSS |
| | | GGGGSGGGGSGGGGSDIVMTQSPSSVSASVGDRVIITCRASQGIRNWL |
| | | AWYQQKPGKAPNLLIYAASNLQSGVPSRFSGSGSGADFTLTISSLQPE |
| | | DVATYYCQKYNSAPFTFGPGTKVDIKTTTPAPRPPTPAPTIASQPLSL |
| | | RPEACRPAAGGAVHTRGLDFACDIYIWAPLAGTCGVLLLSLVITLYCK |
| | | RGRKKLLYIFKQPFMRPVQTTQEEDGCSCRFPEEEEGGCELRVKFSRS |
| | | ADAPAYKQGQNQLYNELNLGRREEYDVLDKRRGRDPEMGGKPRRKNPQ |
| | | EGLYNELQKDKMAEAYSEIGMKGERRRGKGHDGLYQGLSTATKDTYDA |
| | | LHMQALPPR |
| 149367-nt | 1092 | ATGGCCCTCCCTGTCACCGCCCTGCTGCTTCCGCTGGCTCTTCTGCTC |
| Full CAR | | CACGCCGCTCGGCCCCAAGTGCAGCTTCAGGAGAGCGGCCCGGGACTC |
| | | GTGAAGCCGTCCCAGACCCTGTCCCTGACTTGCACCGTGTCGGGAGGA |
| | | AGCATCTCGAGCGGAGGCTACTATTGGTCGTGGATTCGGCAGCACCCT |
| | | GGAAAGGGCCTGGAATGGATCGGCTACATCTACTACTCCGGCTCGACC |
| | | TACTACAACCCATCGCTGAAGTCCAGAGTGACAATCTCAGTGGACACG |
| | | TCCAAGAATCAGTTCAGCCTGAAGCTCTCTTCCGTGACTGCGGCCGAC |
| | | ACCGCCGTGTACTACTGCGCACGCGCTGGAATTGCCGCCCGGCTGAGG |
| | | GGTGCCTTCGACATTTGGGGACAGGGCACCATGGTCACCGTGTCCTCC |
| | | GGCGGCGGAGGTTCCGGGGGTGGAGGCTCAGGAGGAGGGGGGTCCGAC |
| | | ATCGTCATGACTCAGTCGCCCTCAAGCGTCAGCGCGTCCGTCGGGGAC |
| | | AGAGTGATCATCACCTGTCGGGCGTCCCAGGGAATTCGCAACTGGCTG |
| | | GCCTGGTATCAGCAGAAGCCCGGAAAGGCCCCCAACCTGTTGATCTAC |
| | | GCCGCCTCAAACCTCCAATCCGGGGTGCCGAGCCGCTTCAGCGGCTCC |
| | | GGTTCGGGTGCCGATTTCACTCTGACCATCTCCTCCCTGCAACCTGAA |
| | | GATGTGGCTACCTACTACTGCCAAAAGTACAACTCCGCACCTTTTACT |
| | | TTCGGACCGGGGACCAAAGTGGACATTAAGACCACTACCCCAGCACCG |
| | | AGGCCACCCACCCCGGCTCCTACCATCGCCTCCCAGCCTCTGTCCCTG |
| | | CGTCCGGAGGCATGTAGACCCGCAGCTGGTGGGGCCGTGCATACCCGG |
| | | GGTCTTGACTTCGCCTGCGATATCTACATTTGGGCCCCTCTGGCTGGT |
| | | ACTTGCGGGGTCCTGCTGCTTTCACTCGTGATCACTCTTTACTGTAAG |
| | | CGCGGTCGGAAGAAGCTGCTGTACATCTTTAAGCAACCCTTCATGAGG |
| | | CCTGTGCAGACTACTCAAGAGGAGGACGGCTGTTCATGCCGGTTCCCA |
| | | GAGGAGGAGGAAGGCGGCTGCGAACTGCGCGTGAAATTCAGCCGCAGC |
| | | GCAGATGCTCCAGCCTACAAGCAGGGGCAGAACCAGCTCTACAACGAA |
| | | CTCAATCTTGGTCGGAGAGAGGAGTACGACGTGCTGGACAAGCGGAGA |
| | | GGACGGGACCCAGAAATGGGCGGGAAGCCGCGCAGAAAGAATCCCCAA |
| | | GAGGGCCTGTACAACGAGCTCCAAAAGGATAAGATGGCAGAAGCCTAT |
| | | AGCGAGATTGGTATGAAAGGGGAACGCAGAAGAGGCAAAGGCCACGAC |
| | | GGACTGTACCAGGGACTCAGCACCGCCACCAAGGACACCTATGACGCT |
| | | CTTCACATGCAGGCCCTGCCGCCTCGG |

149368

| | | |
|---|---|---|
| 149368-aa | 1093 | QVQLVQSGAEVKKPGSSVKVSCKASGGTFSSYAISWVRQAPGQGLEWM |
| ScFv | | GGIIPIFGTANYAQKFQGRVTITADESTSTAYMELSSLRSEDTAVYYC |
| domain | | ARRGGYQLLRWDVGLLRSAFDIWGQGTMVTVSSGGGGSGGGGSGGGGS |
| | | SYVLTQPPSVSVAPGQTARITCGGNNIGSKSVHWYQQKPGQAPVLVLY |
| | | GKNNRPSGVPDRFSGSRSGTTASLTITGAQAEDEADYYCSSRDSSGDH |
| | | LRVFGTGTKVTVL |
| 149368-nt | 1094 | CAAGTGCAGCTGGTCCAGTCGGGCGCCGAGGTCAAGAAGCCCGGGAGC |
| ScFv | | TCTGTGAAAGTGTCCTGCAAGGCCTCCGGGGGCACCTTTAGCTCCTAC |
| domain | | GCCATCTCCTGGGTCCGCCAAGCACCGGGTCAAGGCCTGGAGTGGATG |
| | | GGGGGAATTATCCCTATCTTCGGCACTGCCAACTACGCCCAGAAGTTC |
| | | CAGGGACGCGTGACCATTACCGCGGACGAATCCACCTCCACCGCTTAT |
| | | ATGGAGCTGTCCAGCTTGCGCTCGGAAGATACCGCCGTGTACTACTGC |
| | | GCCCGGAGGGGTGGATACCAGCTGCTGAGATGGGACGTGGGCCTCCTG |
| | | CGGTCGGCGTTCGACATCTGGGGCCAGGGCACTATGGTCACTGTGTCC |
| | | AGCGGAGGAGGCGGATCGGGAGGCGGCGGATCAGGGGGAGGCGGTTCC |
| | | AGCTACGTGCTTACTCAACCCCCTTCGGTGTCCGTGGCCCCGGGACAG |
| | | ACCGCCAGAATCACTTGCGGAGGAAACAACATTGGGTCCAAGAGCGTG |
| | | CATTGGTACCAGCAGAAGCCAGGACAGGCCCCTGTGCTGGTGCTCTAC |
| | | GGGAAGAACAATCGGCCCAGCGGAGTGCCGGACAGGTTCTCGGGTTCA |
| | | CGCTCCGGTACAACCGCTTCACTGACTATCACCGGGGCCCAGGCAGAG |
| | | GATGAAGCGGACTACTACTGTTCCTCCCGGGATTCATCCGGCGACCAC |
| | | CTCCGGGTGTTCGGAACCGGAACGAAGGTCACCGTGCTG |
| 149368-aa | 1095 | QVQLVQSGAEVKKPGSSVKVSCKASGGTFSSYAISWVRQAPGQGLEWM |
| VH | | GGIIPIFGTANYAQKFQGRVTITADESTSTAYMELSSLRSEDTAVYYC |
| | | ARRGGYQLLRWDVGLLRSAFDIWGQGTMVTVSS |
| 149368-aa | 1096 | SYVLTQPPSVSVAPGQTARITCGGNNIGSKSVHWYQQKPGQAPVLVLY |
| VL | | GKNNRPSGVPDRFSGSRSGTTASLTITGAQAEDEADYYCSSRDSSGDH |
| | | LRVFGTGTKVTVL |
| 149368-aa | 1097 | MALPVTALLLPLALLLHAARPQVQLVQSGAEVKKPGSSVKVSCKASGG |
| Full CAR | | TESSYAISWVRQAPGQGLEWMGGIIPIFGTANYAQKFQGRVTITADES |
| | | TSTAYMELSSLRSEDTAVYYCARRGGYQLLRWDVGLLRSAFDIWGQGT |
| | | MVTVSSGGGGSGGGGSGGGGSSYVLTQPPSVSVAPGQTARITCGGNNI |
| | | GSKSVHWYQQKPGQAPVLVLYGKNNRPSGVPDRFSGSRSGTTASLTIT |
| | | GAQAEDEADYYCSSRDSSGDHLRVFGTGTKVTVLTTTPAPRPPTPAPT |
| | | IASQPLSLRPEACRPAAGGAVHTRGLDFACDIYIWAPLAGTCGVLLLS |
| | | LVITLYCKRGRKKLLYIFKQPFMRPVQTTQEEDGCSCRFPEEEEGGCE |
| | | LRVKFSRSADAPAYKQGQNQLYNELNLGRREEYDVLDKRRGRDPEMGG |
| | | KPRRKNPQEGLYNELQKDKMAEAYSEIGMKGERRRGKGHDGLYQGLST |
| | | ATKDTYDALHMQALPPR |
| 149368-nt | 1098 | ATGGCCCTCCCTGTCACCGCCCTGCTGCTTCCGCTGGCTCTTCTGCTC |
| Full CAR | | CACGCCGCTCGGCCCCAAGTGCAGCTGGTCCAGTCGGGCGCCGAGGTC |
| | | AAGAAGCCCGGGAGCTCTGTGAAAGTGTCCTGCAAGGCCTCCGGGGGC |
| | | ACCTTTAGCTCCTACGCCATCTCCTGGGTCCGCCAAGCACCGGGTCAA |
| | | GGCCTGGAGTGGATGGGGGGAATTATCCCTATCTTCGGCACTGCCAAC |
| | | TACGCCCAGAAGTTCCAGGGACGCGTGACCATTACCGCGGACGAATCC |
| | | ACCTCCACCGCTTATATGGAGCTGTCCAGCTTGCGCTCGGAAGATACC |
| | | GCCGTGTACTACTGCGCCCGGAGGGGTGGATACCAGCTGCTGAGATGG |
| | | GACGTGGGCCTCCTGCGGTCGGCGTTCGACATCTGGGGCCAGGGCACT |
| | | ATGGTCACTGTGTCCAGCGGAGGAGGCGGATCGGGAGGCGGCGGATCA |
| | | GGGGGAGGCGGTTCCAGCTACGTGCTTACTCAACCCCCTTCGGTGTCC |
| | | GTGGCCCCGGGACAGACCGCCAGAATCACTTGCGGAGGAAACAACATT |
| | | GGGTCCAAGAGCGTGCATTGGTACCAGCAGAAGCCAGGACAGGCCCCT |
| | | GTGCTGGTGCTCTACGGGAAGAACAATCGGCCCAGCGGAGTGCCGGAC |
| | | AGGTTCTCGGGTTCACGCTCCGGTACAACCGCTTCACTGACTATCACC |
| | | GGGGCCCAGGCAGAGGATGAAGCGGACTACTACTGTTCCTCCCGGGAT |
| | | TCATCCGGCGACCACCTCCGGGTGTTCGGAACCGGAACGAAGGTCACC |
| | | GTGCTGACCACTACCCCAGCACCGAGGCCACCCACCCCGGCTCCTACC |
| | | ATCGCCTCCCAGCCTCTGTCCCTGCGTCCGGAGGCATGTAGACCCGCA |
| | | GCTGGTGGGGCCGTGCATACCCGGGGTCTTGACTTCGCCTGCGATATC |
| | | TACATTTGGGCCCCTCTGGCTGGTACTTGCGGGGTCCTGCTGCTTTCA |
| | | CTCGTGATCACTCTTTACTGTAAGCGCGGTCGGAAGAAGCTGCTGTAC |
| | | ATCTTTAAGCAACCCTTCATGAGGCCTGTGCAGACTACTCAAGAGGAG |
| | | GACGGCTGTTCATGCCGGTTCCCAGAGGAGGAGGAAGGCGGCTGCGAA |
| | | CTGCGCGTGAAATTCAGCCGCAGCGCAGATGCTCCAGCCTACAAGCAG |
| | | GGGCAGAACCAGCTCTACAACGAACTCAATCTTGGTCGGAGAGAGGAG |
| | | TACGACGTGCTGGACAAGCGGAGAGGACGGGACCCAGAAATGGGCGGG |
| | | AAGCCGCGCAGAAAGAATCCCCAAGAGGGCCTGTACAACGAGCTCCAA |
| | | AAGGATAAGATGGCAGAAGCCTATAGCGAGATTGGTATGAAAGGGGAA |
| | | CGCAGAAGAGGCAAAGGCCACGACGGACTGTACCAGGGACTCAGCACC |
| | | GCCACCAAGGACACCTATGACGCTCTTCACATGCAGGCCCTGCCGCCT |
| | | CGG |

149369

| | | |
|---|---|---|
| 149369-aa | 1099 | EVQLQQSGPGLVKPSQTLSLTCAISGDSVSSNSAAWNWIRQSPSRGLE |
| ScFv | | WLGRTYYRSKWYSFYAISLKSRIIINPDTSKNQFSLQLKSVTPEDTAV |
| domain | | YYCARSSPEGLFLYWEDPWGQGTLVTVSSGGDGSGGGGSGGGGSSSEL |
| | | TQDPAVSVALGQTIRITCQGDSLGNYYATWYQQKPGQAPVLVIYGTNN |
| | | RPSGIPDRFSASSSGNTASLTITGAQAEDEADYYCNSRDSSGHHLLFG |
| | | TGTKVTVL |
| 149369-nt | 1100 | GAAGTGCAGCTCCAACAGTCAGGACCGGGGCTCGTGAAGCCATCCCAG |
| ScFv | | ACCCTGTCCCTGACTTGTGCCATCTCGGGAGATAGCGTGTCATCGAAC |
| domain | | TCCGCCGCCTGGAACTGGATTCGGCAGAGCCCGTCCCGCGGACTGGAG |
| | | TGGCTTGGAAGGACCTACTACCGGTCCAAGTGGTACTCTTTCTACGCG |
| | | ATCTCGCTGAAGTCCCGCATTATCATTAACCCTGATACCTCCAAGAAT |
| | | CAGTTCTCCCTCCAACTGAAATCCGTCACCCCCGAGGACACAGCAGTG |
| | | TATTACTGCGCACGGAGCAGCCCCGAAGGACTGTTCCTGTATTGGTTT |
| | | GACCCCTGGGGCCAGGGGACTCTTGTGACCGTGTCGAGCGGCGGAGAT |
| | | GGGTCCGGTGGCGGTGGTTCGGGGGGCGGCGGATCATCATCCGAACTG |
| | | ACCCAGGACCCGGCTGTGTCCGTGGCGCTGGGACAAACCATCCGCATT |
| | | ACGTGCCAGGGAGACTCCCTGGGCAACTACTACGCCACTTGGTACCAG |
| | | CAGAAGCCGGGCCAAGCCCCTGTGTTGGTCATCTACGGGACCAACAAC |
| | | AGACCTTCCGGCATCCCCGACCGGTTCAGCGCTTCGTCCTCCGGCAAC |
| | | ACTGCCAGCCTGACCATCACTGGAGCGCAGGCCGAAGATGAGGCCGAC |
| | | TACTACTGCAACAGCAGAGACTCCTCGGGTCATCACCTCTTGTTCGGA |
| | | ACTGGAACCAAGGTCACCGTGCTG |
| 149369-aa | 1101 | EVQLQQSGPGLVKPSQTLSLTCAISGDSVSSNSAAWNWIRQSPSRGLE |
| VH | | WLGRTYYRSKWYSFYAISLKSRIIINPDTSKNQFSLQLKSVTPEDTAV |
| | | YYCARSSPEGLFLYWEDPWGQGTLVTVSS |
| 149369-aa | 1102 | SSELTQDPAVSVALGQTIRITCQGDSLGNYYATWYQQKPGQAPVLVIY |
| VL | | GTNNRPSGIPDRFSASSSGNTASLTITGAQAEDEADYYCNSRDSSGHH |
| | | LLFGTGTKVTVL |
| 149369-aa | 1103 | MALPVTALLLPLALLLHAARPEVQLQQSGPGLVKPSQTLSLTCAISGD |
| Full CAR | | SVSSNSAAWNWIRQSPSRGLEWLGRTYYRSKWYSFYAISLKSRIIINP |
| | | DTSKNQFSLQLKSVTPEDTAVYYCARSSPEGLFLYWEDPWGQGTLVTV |
| | | SSGGDGSGGGGSGGGGSSSELTQDPAVSVALGQTIRITCQGDSLGNYY |
| | | ATWYQQKPGQAPVLVIYGTNNRPSGIPDRFSASSSGNTASLTITGAQA |
| | | EDEADYYCNSRDSSGHHLLFGTGTKVTVLTTTPAPRPPTPAPTIASQP |
| | | LSLRPEACRPAAGGAVHTRGLDFACDIYIWAPLAGTCGVLLLSLVITL |
| | | YCKRGRKKLLYIFKQPFMRPVQTTQEEDGCSCRFPEEEEGGCELRVKF |
| | | SRSADAPAYKQGQNQLYNELNLGRREEYDVLDKRRGRDPEMGGKPRRK |
| | | NPQEGLYNELQKDKMAEAYSEIGMKGERRRGKGHDGLYQGLSTATKDT |
| | | YDALHMQALPPR |
| 149369-nt | 1104 | ATGGCCCTCCCTGTCACCGCCCTGCTGCTTCCGCTGGCTCTTCTGCTC |
| Full CAR | | CACGCCGCTCGGCCCGAAGTGCAGCTCCAACAGTCAGGACCGGGGCTC |
| | | GTGAAGCCATCCCAGACCCTGTCCCTGACTTGTGCCATCTCGGGAGAT |
| | | AGCGTGTCATCGAACTCCGCCGCCTGGAACTGGATTCGGCAGAGCCCG |
| | | TCCCGCGGACTGGAGTGGCTTGGAAGGACCTACTACCGGTCCAAGTGG |
| | | TACTCTTTCTACGCGATCTCGCTGAAGTCCCGCATTATCATTAACCCT |
| | | GATACCTCCAAGAATCAGTTCTCCCTCCAACTGAAATCCGTCACCCCC |
| | | GAGGACACAGCAGTGTATTACTGCGCACGGAGCAGCCCCGAAGGACTG |
| | | TTCCTGTATTGGTTTGACCCCTGGGGCCAGGGGACTCTTGTGACCGTG |
| | | TCGAGCGGCGGAGATGGGTCCGGTGGCGGTGGTTCGGGGGGCGGCGGA |
| | | TCATCATCCGAACTGACCCAGGACCCGGCTGTGTCCGTGGCGCTGGGA |
| | | CAAACCATCCGCATTACGTGCCAGGGAGACTCCCTGGGCAACTACTAC |
| | | GCCACTTGGTACCAGCAGAAGCCGGGCCAAGCCCCTGTGTTGGTCATC |
| | | TACGGGACCAACAACAGACCTTCCGGCATCCCCGACCGGTTCAGCGCT |
| | | TCGTCCTCCGGCAACACTGCCAGCCTGACCATCACTGGAGCGCAGGCC |
| | | GAAGATGAGGCCGACTACTACTGCAACAGCAGAGACTCCTCGGGTCAT |
| | | CACCTCTTGTTCGGAACTGGAACCAAGGTCACCGTGCTGACCACTACC |
| | | CCAGCACCGAGGCCACCCACCCCGGCTCCTACCATCGCCTCCCAGCCT |
| | | CTGTCCCTGCGTCCGGAGGCATGTAGACCCGCAGCTGGTGGGGCCGTG |
| | | CATACCCGGGGTCTTGACTTCGCCTGCGATATCTACATTTGGGCCCCT |
| | | CTGGCTGGTACTTGCGGGGTCCTGCTGCTTTCACTCGTGATCACTCTT |
| | | TACTGTAAGCGCGGTCGGAAGAAGCTGCTGTACATCTTTAAGCAACCC |
| | | TTCATGAGGCCTGTGCAGACTACTCAAGAGGAGGACGGCTGTTCATGC |
| | | CGGTTCCCAGAGGAGGAGGAAGGCGGCTGCGAACTGCGCGTGAAATTC |
| | | AGCCGCAGCGCAGATGCTCCAGCCTACAAGCAGGGGCAGAACCAGCTC |
| | | TACAACGAACTCAATCTTGGTCGGAGAGAGGAGTACGACGTGCTGGAC |
| | | AAGCGGAGAGGACGGGACCCAGAAATGGGCGGGAAGCCGCGCAGAAAG |
| | | AATCCCCAAGAGGGCCTGTACAACGAGCTCCAAAAGGATAAGATGGCA |
| | | GAAGCCTATAGCGAGATTGGTATGAAAGGGGAACGCAGAAGAGGCAAA |
| | | GGCCACGACGGACTGTACCAGGGACTCAGCACCGCCACCAAGGACACC |
| | | TATGACGCTCTTCACATGCAGGCCCTGCCGCCTCGG |

BCMA_EBB-C1978-A4

| | | |
|---|---|---|
| BCMA_EBB- | 1105 | EVQLVESGGGLVQPGGSLRLSCAASGFTFSSYAMSWVRQAPGKGLEWV |
| C1978-A4-aa | | SAISGSGGSTYYADSVKGRFTISRDNSKNTLYLQMNSLRAEDTAVYYC |
| ScFv | | AKVEGSGSLDYWGQGTLVTVSSGGGGSGGGGSGGGGSEIVMTQSPGTL |
| domain | | SLSPGERATLSCRASQSVSSAYLAWYQQKPGQPPRLLISGASTRATGI |
| | | PDRFGGSGSGTDFTLTISRLEPEDFAVYYCQHYGSSENGSSLFTFGQG |
| | | TRLEIK |
| BCMA_EBB- | 1106 | GAAGTGCAGCTCGTGGAGTCAGGAGGCGGCCTGGTCCAGCCGGGAGGG |
| C1978-A4- | | TCCCTTAGACTGTCATGCGCCGCAAGCGGATTCACTTTCTCCTCCTAT |
| nt | | GCCATGAGCTGGGTCCGCCAAGCCCCCGGAAAGGGACTGGAATGGGTG |
| ScFv | | TCCGCCATCTCGGGGTCTGGAGGCTCAACTTACTACGCTGACTCCGTG |
| domain | | AAGGGACGGTTCACCATTAGCCGCGACAACTCCAAGAACACCCTCTAC |
| | | CTCCAAATGAACTCCCTGCGGGCCGAGGATACCGCCGTCTACTACTGC |
| | | GCCAAAGTGGAAGGTTCAGGATCGCTGGACTACTGGGGACAGGGTACT |
| | | CTCGTGACCGTGTCATCGGGCGGAGGAGGTTCCGGCGGTGGCGGCTCC |
| | | GGCGGCGGAGGGTCGGAGATCGTGATGACCCAGAGCCCTGGTACTCTG |
| | | AGCCTTTCGCCGGGAGAAAGGGCCACCCTGTCCTGCCGCGCTTCCCAA |
| | | TCCGTGTCCTCCGCGTACTTGGCGTGGTACCAGCAGAAGCCGGGACAG |
| | | CCCCCTCGGCTGCTGATCAGCGGGGCCAGCACCCGGGCAACCGGAATC |
| | | CCAGACAGATTCGGGGGTTCCGGCAGCGGCACAGATTTCACCCTGACT |
| | | ATTTCGAGGTTGGAGCCCGAGGACTTTGCGGTGTATTACTGTCAGCAC |
| | | TACGGGTCGTCCTTTAATGGCTCCAGCCTGTTCACGTTCGGACAGGGG |
| | | ACCCGCCTGGAAATCAAG |
| BCMA_EBB- | 1107 | EVQLVESGGGLVQPGGSLRLSCAASGFTFSSYAMSWVRQAPGKGLEWV |
| C1978-A4-aa | | SAISGSGGSTYYADSVKGRFTISRDNSKNTLYLQMNSLRAEDTAVYYC |
| VH | | AKVEGSGSLDYWGQGTLVTVSS |
| BCMA_EBB- | 1108 | EIVMTQSPGTLSLSPGERATLSCRASQSVSSAYLAWYQQKPGQPPRLL |
| C1978-A4-aa | | ISGASTRATGIPDRFGGSGSGTDFTLTISRLEPEDFAVYYCQHYGSSF |
| VL | | NGSSLFTFGQGTRLEIK |
| BCMA_EBB- | 1109 | MALPVTALLLPLALLLHAARPEVQLVESGGGLVQPGGSLRLSCAASGF |
| C1978-A4-aa | | TFSSYAMSWVRQAPGKGLEWVSAISGSGGSTYYADSVKGRFTISRDNS |
| Full CART | | KNTLYLQMNSLRAEDTAVYYCAKVEGSGSLDYWGQGTLVTVSSGGGGS |
| | | GGGGSGGGGSEIVMTQSPGTLSLSPGERATLSCRASQSVSSAYLAWYQ |
| | | QKPGQPPRLLISGASTRATGIPDRFGGSGSGTDETLTISRLEPEDFAV |
| | | YYCQHYGSSFNGSSLFTFGQGTRLEIKTTTPAPRPPTPAPTIASQPLS |
| | | LRPEACRPAAGGAVHTRGLDFACDIYIWAPLAGTCGVLLLSLVITLYC |
| | | KRGRKKLLYIFKQPFMRPVQTTQEEDGCSCRFPEEEEGGCELRVKFSR |
| | | SADAPAYKQGQNQLYNELNLGRREEYDVLDKRRGRDPEMGGKPRRKNP |
| | | QEGLYNELQKDKMAEAYSEIGMKGERRRGKGHDGLYQGLSTATKDTYD |
| | | ALHMQALPPR |
| BCMA_EBB- | 1110 | ATGGCCCTCCCTGTCACCGCCCTGCTGCTTCCGCTGGCTCTTCTGCTC |
| C1978-A4-nt | | CACGCCGCTCGGCCCGAAGTGCAGCTCGTGGAGTCAGGAGGCGGCCTG |
| Full CART | | GTCCAGCCGGGAGGGTCCCTTAGACTGTCATGCGCCGCAAGCGGATTC |
| | | ACTTTCTCCTCCTATGCCATGAGCTGGGTCCGCCAAGCCCCCGGAAAG |
| | | GGACTGGAATGGGTGTCCGCCATCTCGGGGTCTGGAGGCTCAACTTAC |
| | | TACGCTGACTCCGTGAAGGGACGGTTCACCATTAGCCGCGACAACTCC |
| | | AAGAACACCCTCTACCTCCAAATGAACTCCCTGCGGGCCGAGGATACC |
| | | GCCGTCTACTACTGCGCCAAAGTGGAAGGTTCAGGATCGCTGGACTAC |
| | | TGGGGACAGGGTACTCTCGTGACCGTGTCATCGGGCGGAGGAGGTTCC |
| | | GGCGGTGGCGGCTCCGGCGGCGGAGGGTCGGAGATCGTGATGACCCAG |
| | | AGCCCTGGTACTCTGAGCCTTTCGCCGGGAGAAAGGGCCACCCTGTCC |
| | | TGCCGCGCTTCCCAATCCGTGTCCTCCGCGTACTTGGCGTGGTACCAG |
| | | CAGAAGCCGGGACAGCCCCCTCGGCTGCTGATCAGCGGGGCCAGCACC |
| | | CGGGCAACCGGAATCCCAGACAGATTCGGGGGTTCCGGCAGCGGCACA |
| | | GATTTCACCCTGACTATTTCGAGGTTGGAGCCCGAGGACTTTGCGGTG |
| | | TATTACTGTCAGCACTACGGGTCGTCCTTTAATGGCTCCAGCCTGTTC |
| | | ACGTTCGGACAGGGGACCCGCCTGGAAATCAAGACCACTACCCCAGCA |
| | | CCGAGGCCACCCACCCCGGCTCCTACCATCGCCTCCCAGCCTCTGTCC |
| | | CTGCGTCCGGAGGCATGTAGACCCGCAGCTGGTGGGGCCGTGCATACC |
| | | CGGGGTCTTGACTTCGCCTGCGATATCTACATTTGGGCCCCTCTGGCT |
| | | GGTACTTGCGGGGTCCTGCTGCTTTCACTCGTGATCACTCTTTACTGT |
| | | AAGCGCGGTCGGAAGAAGCTGCTGTACATCTTTAAGCAACCCTTCATG |
| | | AGGCCTGTGCAGACTACTCAAGAGGAGGACGGCTGTTCATGCCGGTTC |
| | | CCAGAGGAGGAGGAAGGCGGCTGCGAACTGCGCGTGAAATTCAGCCGC |
| | | AGCGCAGATGCTCCAGCCTACAAGCAGGGGCAGAACCAGCTCTACAAC |
| | | GAACTCAATCTTGGTCGGAGAGAGGAGTACGACGTGCTGGACAAGCGG |
| | | AGAGGACGGGACCCAGAAATGGGCGGGAAGCCGCGCAGAAAGAATCCC |
| | | CAAGAGGGCCTGTACAACGAGCTCCAAAAGGATAAGATGGCAGAAGCC |
| | | TATAGCGAGATTGGTATGAAAGGGGAACGCAGAAGAGGCAAAGGCCAC |
| | | GACGGACTGTACCAGGGACTCAGCACCGCCACCAAGGACACCTATGAC |
| | | GCTCTTCACATGCAGGCCCTGCCGCCTCGG |

BCMA_EBB-C1978-G1

| | | |
|---|---|---|
| BCMA_EBB- | 1111 | EVQLVETGGGLVQPGGSLRLSCAASGITFSRYPMSWVRQAPGKG |
| C1978-G1-aa | | LEWVSGISDSGVSTYYADSAKGRFTISRDNSKNTLFLQMSSLRDE |
| ScFv | | DTAVYYCVTRAGSEASDIWGQGTMVTVSSGGGGSGGGGSGGG |
| domain | | GSEIVLTQSPATLSLSPGERATLSCRASQSVSNSLAWYQQKPGQA |
| | | PRLLIYDASSRATGIPDRFSGSGSGTDFTLTISRLEPEDFAIYYCQQ |
| | | FGTSSGLTFGGGTKLEIK |
| BCMA_EBB- | 1112 | GAAGTGCAACTGGTGGAAACCGGTGGCGGCCTGGTGCAGCCTGGAGGA |
| C1978-G1-nt | | TCATTGAGGCTGTCATGCGCGGCCAGCGGTATTACCTTCTCCCGGTAC |
| ScFv | | CCCATGTCCTGGGTCAGACAGGCCCCGGGGAAAGGGCTTGAATGGGTG |
| domain | | TCCGGGATCTCGGACTCCGGTGTCAGCACTTACTACGCCGACTCCGCC |
| | | AAGGGACGCTTCACCATTTCCCGGGACAACTCGAAGAACACCCTGTTC |
| | | CTCCAAATGAGCTCCCTCCGGGACGAGGATACTGCAGTGTACTACTGC |
| | | GTGACCCGCGCCGGGTCCGAGGCGTCTGACATTTGGGGACAGGGCACT |
| | | ATGGTCACCGTGTCGTCCGGCGGAGGGGGCTCGGGAGGCGGTGGCAGC |
| | | GGAGGAGGAGGGTCCGAGATCGTGCTGACCCAATCCCCGGCCACCCTC |
| | | TCGCTGAGCCCTGGAGAAAGGGCAACCTTGTCCTGTCGCGCGAGCCAG |
| | | TCCGTGAGCAACTCCCTGGCCTGGTACCAGCAGAAGCCCGGACAGGCT |
| | | CCGAGACTTCTGATCTACGACGCTTCGAGCCGGGCCACTGGAATCCCC |
| | | GACCGCTTTTCGGGGTCCGGCTCAGGAACCGATTTCACCCTGACAATC |
| | | TCACGGCTGGAGCCAGAGGATTTCGCCATCTATTACTGCCAGCAGTTC |
| | | GGTACTTCCTCCGGCCTGACTTTCGGAGGCGGCACGAAGCTCGAAATC |
| | | AAG |
| BCMA_EBB- | 1113 | EVQLVETGGGLVQPGGSLRLSCAASGITFSRYPMSWVRQAPGKGLEWV |
| C1978-G1-aa | | SGISDSGVSTYYADSAKGRFTISRDNSKNTLFLQMSSLRDEDTAVYYC |
| VH | | VTRAGSEASDIWGQGTMVTVSS |
| BCMA_EBB- | 1114 | EIVLTQSPATLSLSPGERATLSCRASQSVSNSLAWYQQKPGQAPRLLI |
| C1978-G1-aa | | YDASSRATGIPDRFSGSGSGTDFTLTISRLEPEDFAIYYCQQFGTSSG |
| VL | | LTFGGGTKLEIK |
| BCMA_EBB- | 1115 | MALPVTALLLPLALLLHAARPEVQLVETGGGLVQPGGSLRLSCA |
| C1978-G1-aa | | ASGITFSRYPMSWVRQAPGKGLEWVSGISDSGVSTYYADSAKGR |
| Full CART | | FTISRDNSKNTLFLQMSSLRDEDTAVYYCVTRAGSEASDIWGQG |
| | | TMVTVSSGGGGSGGGGSGGGGSEIVLTQSPATLSLSPGERATLSC |
| | | RASQSVSNSLAWYQQKPGQAPRLLIYDASSRATGIPDRFSGSGSG |
| | | TDFTLTISRLEPEDFAIYYCQQFGTSSGLTFGGGTKLEIKTTTPAPR |
| | | PPTPAPTIASQPLSLRPEACRPAAGGAVHTRGLDFACDIYIWAPL |
| | | AGTCGVLLLSLVITLYCKRGRKKLLYIFKQPFMRPVQTTQEEDG |
| | | CSCRFPEEEEGGCELRVKFSRSADAPAYKQGQNQLYNELNLGRR |
| | | EEYDVLDKRRGRDPEMGGKPRRKNPQEGLYNELQKDKMAEAY |
| | | SEIGMKGERRRGKGHDGLYQGLSTATKDTYDALHMQALPPR |
| BCMA_EBB- | 1116 | ATGGCCCTCCCTGTCACCGCCCTGCTGCTTCCGCTGGCTCTTCTGCTC |
| C1978-G1-nt | | CACGCCGCTCGGCCCGAAGTGCAACTGGTGGAAACCGGTGGCGGCCTG |
| Full CART | | GTGCAGCCTGGAGGATCATTGAGGCTGTCATGCGCGGCCAGCGGTATT |
| | | ACCTTCTCCCGGTACCCCATGTCCTGGGTCAGACAGGCCCCGGGGAAA |
| | | GGGCTTGAATGGGTGTCCGGGATCTCGGACTCCGGTGTCAGCACTTAC |
| | | TACGCCGACTCCGCCAAGGGACGCTTCACCATTTCCCGGGACAACTCG |
| | | AAGAACACCCTGTTCCTCCAAATGAGCTCCCTCCGGGACGAGGATACT |
| | | GCAGTGTACTACTGCGTGACCCGCGCCGGGTCCGAGGCGTCTGACATT |
| | | TGGGGACAGGGCACTATGGTCACCGTGTCGTCCGGCGGAGGGGGCTCG |
| | | GGAGGCGGTGGCAGCGGAGGAGGAGGGTCCGAGATCGTGCTGACCCAA |
| | | TCCCCGGCCACCCTCTCGCTGAGCCCTGGAGAAAGGGCAACCTTGTCC |
| | | TGTCGCGCGAGCCAGTCCGTGAGCAACTCCCTGGCCTGGTACCAGCAG |
| | | AAGCCCGGACAGGCTCCGAGACTTCTGATCTACGACGCTTCGAGCCGG |
| | | GCCACTGGAATCCCCGACCGCTTTTCGGGGTCCGGCTCAGGAACCGAT |
| | | TTCACCCTGACAATCTCACGGCTGGAGCCAGAGGATTTCGCCATCTAT |
| | | TACTGCCAGCAGTTCGGTACTTCCTCCGGCCTGACTTTCGGAGGCGGC |
| | | ACGAAGCTCGAAATCAAGACCACTACCCCAGCACCGAGGCCACCCACC |
| | | CCGGCTCCTACCATCGCCTCCCAGCCTCTGTCCCTGCGTCCGGAGGCA |
| | | TGTAGACCCGCAGCTGGTGGGGCCGTGCATACCCGGGGTCTTGACTTC |
| | | GCCTGCGATATCTACATTTGGGCCCCTCTGGCTGGTACTTGCGGGGTC |
| | | CTGCTGCTTTCACTCGTGATCACTCTTTACTGTAAGCGCGGTCGGAAG |
| | | AAGCTGCTGTACATCTTTAAGCAACCCTTCATGAGGCCTGTGCAGACT |
| | | ACTCAAGAGGAGGACGGCTGTTCATGCCGGTTCCCAGAGGAGGAGGAA |
| | | GGCGGCTGCGAACTGCGCGTGAAATTCAGCCGCAGCGCAGATGCTCCA |
| | | GCCTACAAGCAGGGGCAGAACCAGCTCTACAACGAACTCAATCTTGGT |
| | | CGGAGAGAGGAGTACGACGTGCTGGACAAGCGGAGAGGACGGGACCCA |
| | | GAAATGGGCGGGAAGCCGCGCAGAAAGAATCCCCAAGAGGGCCTGTAC |
| | | AACGAGCTCCAAAAGGATAAGATGGCAGAAGCCTATAGCGAGATTGGT |
| | | ATGAAAGGGGAACGCAGAAGAGGCAAAGGCCACGACGGACTGTACCAG |
| | | GGACTCAGCACCGCCACCAAGGACACCTATGACGCTCTTCACATGCAG |
| | | GCCCTGCCGCCTCGG |

BCMA_EBB-C1979-C1

| | | |
|---|---|---|
| BCMA_EBB- | 1117 | QVQLVESGGGLVQPGGSLRLSCAASGFTFSSYAMSWVRQAPGKGLEWV |
| C1979-C1-aa | | SAISGSGGSTYYADSVKGRFTISRDNAKNSLYLQMNSLRAEDTAIYYC |
| ScFv | | ARATYKRELRYYYGMDVWGQGTMVTVSSGGGGSGGGGSGGGGSEIVMT |
| domain | | QSPGTVSLSPGERATLSCRASQSVSSSFLAWYQQKPGQAPRLLIYGAS |
| | | SRATGIPDRFSGSGSGTDFTLTISRLEPEDSAVYYCQQYHSSPSWTFG |
| | | QGTRLEIK |
| BCMA_EBB- | 1118 | CAAGTGCAGCTCGTGGAATCGGGTGGCGGACTGGTGCAGCCGGGGGGC |
| C1979-C1-nt | | TCACTTAGACTGTCCTGCGCGGCCAGCGGATTCACTTTCTCCTCCTAC |
| ScFv | | GCCATGTCCTGGGTCAGACAGGCCCCTGGAAAGGGCCTGGAATGGGTG |
| domain | | TCCGCAATCAGCGGCAGCGGCGGCTCGACCTATTACGCGGATTCAGTG |
| | | AAGGGCAGATTCACCATTTCCCGGGACAACGCCAAGAACTCCTTGTAC |
| | | CTTCAAATGAACTCCCTCCGCGCGGAAGATACCGCAATCTACTACTGC |
| | | GCTCGGGCCACTTACAAGAGGGAACTGCGCTACTACTACGGGATGGAC |
| | | GTCTGGGGCCAGGGAACCATGGTCACCGTGTCCAGCGGAGGAGGAGGA |
| | | TCGGGAGGAGGCGGTAGCGGGGGTGGAGGGTCGGAGATCGTGATGACC |
| | | CAGTCCCCCGGCACTGTGTCGCTGTCCCCCGGCGAACGGGCCACCCTG |
| | | TCATGTCGGGCCAGCCAGTCAGTGTCGTCAAGCTTCCTCGCCTGGTAC |
| | | CAGCAGAAACCGGGACAAGCTCCCCGCCTGCTGATCTACGGAGCCAGC |
| | | AGCCGGGCCACCGGTATTCCTGACCGGTTCTCCGGTTCGGGGTCCGGG |
| | | ACCGACTTTACTCTGACTATCTCTCGCCTCGAGCCAGAGGACTCCGCC |
| | | GTGTATTACTGCCAGCAGTACCACTCCTCCCCGTCCTGGACGTTCGGA |
| | | CAGGGCACAAGGCTGGAGATTAAG |
| BCMA_EBB- | 1119 | QVQLVESGGGLVQPGGSLRLSCAASGFTFSSYAMSWVRQAPGKGLEWV |
| C1979-C1-aa | | SAISGSGGSTYYADSVKGRFTISRDNAKNSLYLQMNSLRAEDTAIYYC |
| VH | | ARATYKRELRYYYGMDVWGQGTMVTVSS |
| BCMA_EBB- | 1120 | EIVMTQSPGTVSLSPGERATLSCRASQSVSSSFLAWYQQKPGQAPRLL |
| C1979-C1-aa | | IYGASSRATGIPDRFSGSGSGTDFTLTISRLEPEDSAVYYCQQYHSSP |
| VL | | SWTFGQGTRLEIK |
| BCMA_EBB- | 1121 | MALPVTALLLPLALLLHAARPQVQLVESGGGLVQPGGSLRLSCAASGF |
| C1979-C1-aa | | TFSSYAMSWVRQAPGKGLEWVSAISGSGGSTYYADSVKGRFTISRDNA |
| Full CART | | KNSLYLQMNSLRAEDTAIYYCARATYKRELRYYYGMDVWGQGTMVTVS |
| | | SGGGGSGGGGSGGGGSEIVMTQSPGTVSLSPGERATLSCRASQSVSSS |
| | | FLAWYQQKPGQAPRLLIYGASSRATGIPDRFSGSGSGTDFTLTISRLE |
| | | PEDSAVYYCQQYHSSPSWTFGQGTRLEIKTTTPAPRPPTPAPTIASQP |
| | | LSLRPEACRPAAGGAVHTRGLDFACDIYIWAPLAGTCGVLLLSLVITL |
| | | YCKRGRKKLLYIFKQPFMRPVQTTQEEDGCSCRFPEEEEGGCELRVKF |
| | | SRSADAPAYKQGQNQLYNELNLGRREEYDVLDKRRGRDPEMGGKPRRK |
| | | NPQEGLYNELQKDKMAEAYSEIGMKGERRRGKGHDGLYQGLSTATKDT |
| | | YDALHMQALPPR |
| BCMA_EBB- | 1122 | ATGGCCCTCCCTGTCACCGCCCTGCTGCTTCCGCTGGCTCTTCTGCTC |
| C1979-C1-nt | | CACGCCGCTCGGCCCCAAGTGCAGCTCGTGGAATCGGGTGGCGGACTG |
| Full CART | | GTGCAGCCGGGGGGCTCACTTAGACTGTCCTGCGCGGCCAGCGGATTC |
| | | ACTTTCTCCTCCTACGCCATGTCCTGGGTCAGACAGGCCCCTGGAAAG |
| | | GGCCTGGAATGGGTGTCCGCAATCAGCGGCAGCGGCGGCTCGACCTAT |
| | | TACGCGGATTCAGTGAAGGGCAGATTCACCATTTCCCGGGACAACGCC |
| | | AAGAACTCCTTGTACCTTCAAATGAACTCCCTCCGCGCGGAAGATACC |
| | | GCAATCTACTACTGCGCTCGGGCCACTTACAAGAGGGAACTGCGCTAC |
| | | TACTACGGGATGGACGTCTGGGGCCAGGGAACCATGGTCACCGTGTCC |
| | | AGCGGAGGAGGAGGATCGGGAGGAGGCGGTAGCGGGGGTGGAGGGTCG |
| | | GAGATCGTGATGACCCAGTCCCCCGGCACTGTGTCGCTGTCCCCCGGC |
| | | GAACGGGCCACCCTGTCATGTCGGGCCAGCCAGTCAGTGTCGTCAAGC |
| | | TTCCTCGCCTGGTACCAGCAGAAACCGGGACAAGCTCCCCGCCTGCTG |
| | | ATCTACGGAGCCAGCAGCCGGGCCACCGGTATTCCTGACCGGTTCTCC |
| | | GGTTCGGGGTCCGGGACCGACTTTACTCTGACTATCTCTCGCCTCGAG |
| | | CCAGAGGACTCCGCCGTGTATTACTGCCAGCAGTACCACTCCTCCCCG |
| | | TCCTGGACGTTCGGACAGGGCACAAGGCTGGAGATTAAGACCACTACC |
| | | CCAGCACCGAGGCCACCCACCCCGGCTCCTACCATCGCCTCCCAGCCT |
| | | CTGTCCCTGCGTCCGGAGGCATGTAGACCCGCAGCTGGTGGGGCCGTG |
| | | CATACCCGGGGTCTTGACTTCGCCTGCGATATCTACATTTGGGCCCCT |
| | | CTGGCTGGTACTTGCGGGGTCCTGCTGCTTTCACTCGTGATCACTCTT |
| | | TACTGTAAGCGCGGTCGGAAGAAGCTGCTGTACATCTTTAAGCAACCC |
| | | TTCATGAGGCCTGTGCAGACTACTCAAGAGGAGGACGGCTGTTCATGC |
| | | CGGTTCCCAGAGGAGGAGGAAGGCGGCTGCGAACTGCGCGTGAAATTC |
| | | AGCCGCAGCGCAGATGCTCCAGCCTACAAGCAGGGGCAGAACCAGCTC |
| | | TACAACGAACTCAATCTTGGTCGGAGAGAGGAGTACGACGTGCTGGAC |
| | | AAGCGGAGAGGACGGGACCCAGAAATGGGCGGGAAGCCGCGCAGAAAG |
| | | AATCCCCAAGAGGGCCTGTACAACGAGCTCCAAAAGGATAAGATGGCA |
| | | GAAGCCTATAGCGAGATTGGTATGAAAGGGGAACGCAGAAGAGGCAAA |
| | | GGCCACGACGGACTGTACCAGGGACTCAGCACCGCCACCAAGGACACC |
| | | TATGACGCTCTTCACATGCAGGCCCTGCCGCCTCGG |

BCMA_EBB-C1978-C7

| | | |
|---|---|---|
| BCMA_EBB- | 1123 | EVQLVETGGGLVQPGGSLRLSCAASGFTFSSYAMSWVRQAPGKGLEWV |
| C1978-C7-aa | | SAISGSGGSTYYADSVKGRFTISRDNSKNTLYLQMNTLKAEDTAVYYC |
| ScFv | | ARATYKRELRYYYGMDVWGQGTTVTVSSGGGGSGGGGSGGGGSEIVLT |
| domain | | QSPSTLSLSPGESATLSCRASQSVSTTFLAWYQQKPGQAPRLLIYGSS |
| | | NRATGIPDRFSGSGSGTDFTLTIRRLEPEDFAVYYCQQYHSSPSWTFG |
| | | QGTKVEIK |
| BCMA_EBB- | 1124 | GAGGTGCAGCTTGTGGAAACCGGTGGCGGACTGGTGCAGCCCGGAGGA |
| C1978-C7-nt | | AGCCTCAGGCTGTCCTGCGCCGCGTCCGGCTTCACCTTCTCCTCGTAC |
| ScFv | | GCCATGTCCTGGGTCCGCCAGGCCCCCGGAAAGGGCCTGGAATGGGTG |
| domain | | TCCGCCATCTCTGGAAGCGGAGGTTCCACGTACTACGCGGACAGCGTC |
| | | AAGGGAAGGTTCACAATCTCCCGCGATAATTCGAAGAACACTCTGTAC |
| | | CTTCAAATGAACACCCTGAAGGCCGAGGACACTGCTGTGTACTACTGC |
| | | GCACGGGCCACCTACAAGAGAGAGCTCCGGTACTACTACGGAATGGAC |
| | | GTCTGGGGCCAGGGAACTACTGTGACCGTGTCCTCGGGAGGGGGTGGC |
| | | TCCGGGGGGGGCGGCTCCGGCGGAGGCGGTTCCGAGATTGTGCTGACC |
| | | CAGTCACCTTCAACTCTGTCGCTGTCCCCGGGAGAGAGCGCTACTCTG |
| | | AGCTGCCGGGCCAGCCAGTCCGTGTCCACCACCTTCCTCGCCTGGTAT |
| | | CAGCAGAAGCCGGGGCAGGCACCACGGCTCTTGATCTACGGGTCAAGC |
| | | AACAGAGCGACCGGAATTCCTGACCGCTTCTCGGGGAGCGGTTCAGGC |
| | | ACCGACTTCACCCTGACTATCCGGCGCCTGGAACCCGAAGATTTCGCC |
| | | GTGTATTACTGTCAACAGTACCACTCCTCGCCGTCCTGGACCTTTGGC |
| | | CAAGGAACCAAAGTGGAAATCAAG |
| BCMA_EBB- | 1125 | EVQLVETGGGLVQPGGSLRLSCAASGFTFSSYAMSWVRQAPGKGLEWV |
| C1978-C7-aa | | SAISGSGGSTYYADSVKGRFTISRDNSKNTLYLQMNTLKAEDTAVYYC |
| VH | | ARATYKRELRYYYGMDVWGQGTTVTVSS |
| BCMA_EBB- | 1126 | EIVLTQSPSTLSLSPGESATLSCRASQSVSTTFLAWYQQKPGQAPRLL |
| C1978-C7-aa | | IYGSSNRATGIPDRFSGSGSGTDFTLTIRRLEPEDFAVYYCQQYHSSP |
| VL | | SWTFGQGTKVEIK |
| BCMA_EBB- | 1127 | MALPVTALLLPLALLLHAARPEVQLVETGGGLVQPGGSLRLSCAASGF |
| C1978-C7-aa | | TFSSYAMSWVRQAPGKGLEWVSAISGSGGSTYYADSVKGRFTISRDNS |
| Full CART | | KNTLYLQMNTLKAEDTAVYYCARATYKRELRYYYGMDVWGQGTTVTVS |
| | | SGGGGSGGGGSGGGGSEIVLTQSPSTLSLSPGESATLSCRASQSVSTT |
| | | FLAWYQQKPGQAPRLLIYGSSNRATGIPDRFSGSGSGTDFTLTIRRLE |
| | | PEDFAVYYCQQYHSSPSWTFGQGTKVEIKTTTPAPRPPTPAPTIASQP |
| | | LSLRPEACRPAAGGAVHTRGLDFACDIYIWAPLAGTCGVLLLSLVITL |
| | | YCKRGRKKLLYIFKQPFMRPVQTTQEEDGCSCRFPEEEEGGCELRVKF |
| | | SRSADAPAYKQGQNQLYNELNLGRREEYDVLDKRRGRDPEMGGKPRRK |
| | | NPQEGLYNELQKDKMAEAYSEIGMKGERRRGKGHDGLYQGLSTATKDT |
| | | YDALHMQALPPR |
| BCMA_EBB- | 1128 | ATGGCCCTCCCTGTCACCGCCCTGCTGCTTCCGCTGGCTCTTCTGCTC |
| C1978-C7-nt | | CACGCCGCTCGGCCCGAGGTGCAGCTTGTGGAAACCGGTGGCGGACTG |
| Full CART | | GTGCAGCCCGGAGGAAGCCTCAGGCTGTCCTGCGCCGCGTCCGGCTTC |
| | | ACCTTCTCCTCGTACGCCATGTCCTGGGTCCGCCAGGCCCCCGGAAAG |
| | | GGCCTGGAATGGGTGTCCGCCATCTCTGGAAGCGGAGGTTCCACGTAC |
| | | TACGCGGACAGCGTCAAGGGAAGGTTCACAATCTCCCGCGATAATTCG |
| | | AAGAACACTCTGTACCTTCAAATGAACACCCTGAAGGCCGAGGACACT |
| | | GCTGTGTACTACTGCGCACGGGCCACCTACAAGAGAGAGCTCCGGTAC |
| | | TACTACGGAATGGACGTCTGGGGCCAGGGAACTACTGTGACCGTGTCC |
| | | TCGGGAGGGGGTGGCTCCGGGGGGGGCGGCTCCGGCGGAGGCGGTTCC |
| | | GAGATTGTGCTGACCCAGTCACCTTCAACTCTGTCGCTGTCCCCGGGA |
| | | GAGAGCGCTACTCTGAGCTGCCGGGCCAGCCAGTCCGTGTCCACCACC |
| | | TTCCTCGCCTGGTATCAGCAGAAGCCGGGGCAGGCACCACGGCTCTTG |
| | | ATCTACGGGTCAAGCAACAGAGCGACCGGAATTCCTGACCGCTTCTCG |
| | | GGGAGCGGTTCAGGCACCGACTTCACCCTGACTATCCGGCGCCTGGAA |
| | | CCCGAAGATTTCGCCGTGTATTACTGTCAACAGTACCACTCCTCGCCG |
| | | TCCTGGACCTTTGGCCAAGGAACCAAAGTGGAAATCAAGACCACTACC |
| | | CCAGCACCGAGGCCACCCACCCCGGCTCCTACCATCGCCTCCCAGCCT |
| | | CTGTCCCTGCGTCCGGAGGCATGTAGACCCGCAGCTGGTGGGGCCGTG |
| | | CATACCCGGGGTCTTGACTTCGCCTGCGATATCTACATTTGGGCCCCT |
| | | CTGGCTGGTACTTGCGGGGTCCTGCTGCTTTCACTCGTGATCACTCTT |
| | | TACTGTAAGCGCGGTCGGAAGAAGCTGCTGTACATCTTTAAGCAACCC |
| | | TTCATGAGGCCTGTGCAGACTACTCAAGAGGAGGACGGCTGTTCATGC |
| | | CGGTTCCCAGAGGAGGAGGAAGGCGGCTGCGAACTGCGCGTGAAATTC |
| | | AGCCGCAGCGCAGATGCTCCAGCCTACAAGCAGGGGCAGAACCAGCTC |
| | | TACAACGAACTCAATCTTGGTCGGAGAGAGGAGTACGACGTGCTGGAC |
| | | AAGCGGAGAGGACGGGACCCAGAAATGGGCGGGAAGCCGCGCAGAAAG |
| | | AATCCCCAAGAGGGCCTGTACAACGAGCTCCAAAAGGATAAGATGGCA |
| | | GAAGCCTATAGCGAGATTGGTATGAAAGGGGAACGCAGAAGAGGCAAA |
| | | GGCCACGACGGACTGTACCAGGGACTCAGCACCGCCACCAAGGACACC |
| | | TATGACGCTCTTCACATGCAGGCCCTGCCGCCTCGG |

BCMA_EBB-C1978-D10

| | | |
|---|---|---|
| BCMA_EBB- | 1129 | EVQLVETGGGLVQPGRSLRLSCAASGFTFDDYAMHWVRQAPGKGLEWV |
| C1978- | | SGISWNSGSIGYADSVKGRFTISRDNAKNSLYLQMNSLRDEDTAVYYC |
| D10-aa | | ARVGKAVPDVWGQGTTVTVSSGGGGSGGGGSGGGGSDIVMTQTPSSLS |
| ScFv | | ASVGDRVTITCRASQSISSYLNWYQQKPGKAPKLLIYAASSLQSGVPS |
| domain | | RFSGSGSGTDFTLTISSLQPEDFATYYCQQSYSTPYSFGQGTRLEIK |
| BCMA_EBB- | 1130 | GAAGTGCAGCTCGTGGAAACTGGAGGTGGACTCGTGCAGCCTGGACGG |
| C1978- | | TCGCTGCGGCTGAGCTGCGCTGCATCCGGCTTCACCTTCGACGATTAT |
| D10-nt | | GCCATGCACTGGGTCAGACAGGCGCCAGGGAAGGGACTTGAGTGGGTG |
| ScFv | | TCCGGTATCAGCTGGAATAGCGGCTCAATCGGATACGCGGACTCCGTG |
| domain | | AAGGGAAGGTTCACCATTTCCCGCGACAACGCCAAGAACTCCCTGTAC |
| | | TTGCAAATGAACAGCCTCCGGGATGAGGACACTGCCGTGTACTACTGC |
| | | GCCCGCGTCGGAAAAGCTGTGCCCGACGTCTGGGGCCAGGGAACCACT |
| | | GTGACCGTGTCCAGCGGCGGGGGTGGATCGGGCGGTGGAGGGTCCGGT |
| | | GGAGGGGGCTCAGATATTGTGATGACCCAGACCCCCTCGTCCCTGTCC |
| | | GCCTCGGTCGGCGACCGCGTGACTATCACATGTAGAGCCTCGCAGAGC |
| | | ATCTCCAGCTACCTGAACTGGTATCAGCAGAAGCCGGGGAAGGCCCCG |
| | | AAGCTCCTGATCTACGCGGCATCATCACTGCAATCGGGAGTGCCGAGC |
| | | CGGTTTTCCGGGTCCGGCTCCGGCACCGACTTCACGCTGACCATTTCT |
| | | TCCCTGCAACCCGAGGACTTCGCCACTTACTACTGCCAGCAGTCCTAC |
| | | TCCACCCCTTACTCCTTCGGCCAAGGAACCAGGCTGGAAATCAAG |
| BCMA_EBB- | 1131 | EVQLVETGGGLVQPGRSLRLSCAASGFTFDDYAMHWVRQAPGKGLEWV |
| C1978- | | SGISWNSGSIGYADSVKGRFTISRDNAKNSLYLQMNSLRDEDTAVYYC |
| D10-aa | | ARVGKAVPDVWGQGTTVTVSS |
| VH | | |
| BCMA_EBB- | 1132 | DIVMTQTPSSLSASVGDRVTITCRASQSISSYLNWYQQKPGKAPKLLI |
| C1978- | | YAASSLQSGVPSRFSGSGSGTDFTLTISSLQPEDFATYYCQQSYSTPY |
| D10-aa | | SFGQGTRLEIK |
| VL | | |
| BCMA_EBB- | 1133 | MALPVTALLLPLALLLHAARPEVQLVETGGGLVQPGRSLRLSCAASGF |
| C1978- | | TEDDYAMHWVRQAPGKGLEWVSGISWNSGSIGYADSVKGRFTISRDNA |
| D10-aa | | KNSLYLQMNSLRDEDTAVYYCARVGKAVPDVWGQGTTVTVSSGGGGSG |
| Full CART | | GGGSGGGGSDIVMTQTPSSLSASVGDRVTITCRASQSISSYLNWYQQK |
| | | PGKAPKLLIYAASSLQSGVPSRESGSGSGTDFTLTISSLQPEDFATYY |
| | | CQQSYSTPYSFGQGTRLEIKTTTPAPRPPTPAPTIASQPLSLRPEACR |
| | | PAAGGAVHTRGLDFACDIYIWAPLAGTCGVLLLSLVITLYCKRGRKKL |
| | | LYIFKQPFMRPVQTTQEEDGCSCRFPEEEEGGCELRVKESRSADAPAY |
| | | KQGQNQLYNELNLGRREEYDVLDKRRGRDPEMGGKPRRKNPQEGLYNE |
| | | LQKDKMAEAYSEIGMKGERRRGKGHDGLYQGLSTATKDTYDALHMQAL |
| | | PPR |
| BCMA_EBB- | 1134 | ATGGCCCTCCCTGTCACCGCCCTGCTGCTTCCGCTGGCTCTTCTGCTC |
| C1978- | | CACGCCGCTCGGCCCGAAGTGCAGCTCGTGGAAACTGGAGGTGGACTC |
| D10-nt | | GTGCAGCCTGGACGGTCGCTGCGGCTGAGCTGCGCTGCATCCGGCTTC |
| Full CART | | ACCTTCGACGATTATGCCATGCACTGGGTCAGACAGGCGCCAGGGAAG |
| | | GGACTTGAGTGGGTGTCCGGTATCAGCTGGAATAGCGGCTCAATCGGA |
| | | TACGCGGACTCCGTGAAGGGAAGGTTCACCATTTCCCGCGACAACGCC |
| | | AAGAACTCCCTGTACTTGCAAATGAACAGCCTCCGGGATGAGGACACT |
| | | GCCGTGTACTACTGCGCCCGCGTCGGAAAAGCTGTGCCCGACGTCTGG |
| | | GGCCAGGGAACCACTGTGACCGTGTCCAGCGGCGGGGGTGGATCGGGC |
| | | GGTGGAGGGTCCGGTGGAGGGGGCTCAGATATTGTGATGACCCAGACC |
| | | CCCTCGTCCCTGTCCGCCTCGGTCGGCGACCGCGTGACTATCACATGT |
| | | AGAGCCTCGCAGAGCATCTCCAGCTACCTGAACTGGTATCAGCAGAAG |
| | | CCGGGGAAGGCCCCGAAGCTCCTGATCTACGCGGCATCATCACTGCAA |
| | | TCGGGAGTGCCGAGCCGGTTTTCCGGGTCCGGCTCCGGCACCGACTTC |
| | | ACGCTGACCATTTCTTCCCTGCAACCCGAGGACTTCGCCACTTACTAC |
| | | TGCCAGCAGTCCTACTCCACCCCTTACTCCTTCGGCCAAGGAACCAGG |
| | | CTGGAAATCAAGACCACTACCCCAGCACCGAGGCCACCCACCCCGGCT |
| | | CCTACCATCGCCTCCCAGCCTCTGTCCCTGCGTCCGGAGGCATGTAGA |
| | | CCCGCAGCTGGTGGGGCCGTGCATACCCGGGGTCTTGACTTCGCCTGC |
| | | GATATCTACATTTGGGCCCCTCTGGCTGGTACTTGCGGGGTCCTGCTG |
| | | CTTTCACTCGTGATCACTCTTTACTGTAAGCGCGGTCGGAAGAAGCTG |
| | | CTGTACATCTTTAAGCAACCCTTCATGAGGCCTGTGCAGACTACTCAA |
| | | GAGGAGGACGGCTGTTCATGCCGGTTCCCAGAGGAGGAGGAAGGCGGC |
| | | TGCGAACTGCGCGTGAAATTCAGCCGCAGCGCAGATGCTCCAGCCTAC |
| | | AAGCAGGGGCAGAACCAGCTCTACAACGAACTCAATCTTGGTCGGAGA |
| | | GAGGAGTACGACGTGCTGGACAAGCGGAGAGGACGGGACCCAGAAATG |
| | | GGCGGGAAGCCGCGCAGAAAGAATCCCCAAGAGGGCCTGTACAACGAG |
| | | CTCCAAAAGGATAAGATGGCAGAAGCCTATAGCGAGATTGGTATGAAA |
| | | GGGGAACGCAGAAGAGGCAAAGGCCACGACGGACTGTACCAGGGACTC |
| | | AGCACCGCCACCAAGGACACCTATGACGCTCTTCACATGCAGGCCCTG |
| | | CCGCCTCGG |

BCMA_EBB-C1979-C12

| | | |
|---|---|---|
| BCMA_EBB- | 1135 | EVQLVESGGGLVQPGRSLRLSCTASGFTFDDYAMHWVRQRPGKGLEWV |
| C1979- | | ASINWKGNSLAYGDSVKGRFAISRDNAKNTVFLQMNSLRTEDTAVYYC |
| C12-aa | | ASHQGVAYYNYAMDVWGRGTLVTVSSGGGGSGGGGSGGGGSEIVLTQS |
| ScFv | | PGTLSLSPGERATLSCRATQSIGSSFLAWYQQRPGQAPRLLIYGASQR |
| domain | | ATGIPDRFSGRGSGTDFTLTISRVEPEDSAVYYCQHYESSPSWTFGQG |
| | | TKVEIK |
| BCMA_EBB- | 1136 | GAAGTGCAGCTCGTGGAGAGCGGGGGAGGATTGGTGCAGCCCGGAAGG |
| C1979- | | TCCCTGCGGCTCTCCTGCACTGCGTCTGGCTTCACCTTCGACGACTAC |
| C12-nt | | GCGATGCACTGGGTCAGACAGCGCCCGGGAAAGGGCCTGGAATGGGTC |
| ScFv | | GCCTCAATCAACTGGAAGGGAAACTCCCTGGCCTATGGCGACAGCGTG |
| domain | | AAGGGCCGCTTCGCCATTTCGCGCGACAACGCCAAGAACACCGTGTTT |
| | | CTGCAAATGAATTCCCTGCGGACCGAGGATACCGCTGTGTACTACTGC |
| | | GCCAGCCACCAGGGCGTGGCATACTATAACTACGCCATGGACGTGTGG |
| | | GGAAGAGGGACGCTCGTCACCGTGTCCTCCGGGGGCGGTGGATCGGGT |
| | | GGAGGAGGAAGCGGTGGCGGGGGCAGCGAAATCGTGCTGACTCAGAGC |
| | | CCGGGAACTCTTTCACTGTCCCCGGGAGAACGGGCCACTCTCTCGTGC |
| | | CGGGCCACCCAGTCCATCGGCTCCTCCTTCCTTGCCTGGTACCAGCAG |
| | | AGGCCAGGACAGGCGCCCCGCCTGCTGATCTACGGTGCTTCCCAACGC |
| | | GCCACTGGCATTCCTGACCGGTTCAGCGGCAGAGGGTCGGGAACCGAT |
| | | TTCACACTGACCATTTCCCGGGTGGAGCCCGAAGATTCGGCAGTCTAC |
| | | TACTGTCAGCATTACGAGTCCTCCCCTTCATGGACCTTCGGTCAAGGG |
| | | ACCAAAGTGGAGATCAAG |
| BCMA_EBB- | 1137 | EVQLVESGGGLVQPGRSLRLSCTASGFTFDDYAMHWVRQRPGKGLEWV |
| C1979- | | ASINWKGNSLAYGDSVKGRFAISRDNAKNTVFLQMNSLRTEDTAVYYC |
| C12-aa | | ASHQGVAYYNYAMDVWGRGTLVTVSS |
| VH | | |
| BCMA_EBB- | 1138 | EIVLTQSPGTLSLSPGERATLSCRATQSIGSSFLAWYQQRPGQAPRLL |
| C1979- | | IYGASQRATGIPDRFSGRGSGTDFTLTISRVEPEDSAVYYCQHYESSP |
| C12-aa | | SWTFGQGTKVEIK |
| VL | | |
| BCMA_EBB- | 1139 | MALPVTALLLPLALLLHAARPEVQLVESGGGLVQPGRSLRLSCTASGF |
| C1979- | | TEDDYAMHWVRQRPGKGLEWVASINWKGNSLAYGDSVKGRFAISRDNA |
| C12-aa | | KNTVFLQMNSLRTEDTAVYYCASHQGVAYYNYAMDVWGRGTLVTVSSG |
| Full CART | | GGGSGGGGSGGGGSEIVLTQSPGTLSLSPGERATLSCRATQSIGSSEL |
| | | AWYQQRPGQAPRLLIYGASQRATGIPDRFSGRGSGTDETLTISRVEPE |
| | | DSAVYYCQHYESSPSWTFGQGTKVEIKTTTPAPRPPTPAPTIASQPLS |
| | | LRPEACRPAAGGAVHTRGLDFACDIYIWAPLAGTCGVLLLSLVITLYC |
| | | KRGRKKLLYIFKQPFMRPVQTTQEEDGCSCRFPEEEEGGCELRVKFSR |
| | | SADAPAYKQGQNQLYNELNLGRREEYDVLDKRRGRDPEMGGKPRRKNP |
| | | QEGLYNELQKDKMAEAYSEIGMKGERRRGKGHDGLYQGLSTATKDTYD |
| | | ALHMQALPPR |
| BCMA_EBB- | 1140 | ATGGCCCTCCCTGTCACCGCCCTGCTGCTTCCGCTGGCTCTTCTGCTC |
| C1979- | | CACGCCGCTCGGCCCGAAGTGCAGCTCGTGGAGAGCGGGGGAGGATTG |
| C12-nt | | GTGCAGCCCGGAAGGTCCCTGCGGCTCTCCTGCACTGCGTCTGGCTTC |
| Full CART | | ACCTTCGACGACTACGCGATGCACTGGGTCAGACAGCGCCCGGGAAAG |
| | | GGCCTGGAATGGGTCGCCTCAATCAACTGGAAGGGAAACTCCCTGGCC |
| | | TATGGCGACAGCGTGAAGGGCCGCTTCGCCATTTCGCGCGACAACGCC |
| | | AAGAACACCGTGTTTCTGCAAATGAATTCCCTGCGGACCGAGGATACC |
| | | GCTGTGTACTACTGCGCCAGCCACCAGGGCGTGGCATACTATAACTAC |
| | | GCCATGGACGTGTGGGGAAGAGGGACGCTCGTCACCGTGTCCTCCGGG |
| | | GGCGGTGGATCGGGTGGAGGAGGAAGCGGTGGCGGGGGCAGCGAAATC |
| | | GTGCTGACTCAGAGCCCGGGAACTCTTTCACTGTCCCCGGGAGAACGG |
| | | GCCACTCTCTCGTGCCGGGCCACCCAGTCCATCGGCTCCTCCTTCCTT |
| | | GCCTGGTACCAGCAGAGGCCAGGACAGGCGCCCCGCCTGCTGATCTAC |
| | | GGTGCTTCCCAACGCGCCACTGGCATTCCTGACCGGTTCAGCGGCAGA |
| | | GGGTCGGGAACCGATTTCACACTGACCATTTCCCGGGTGGAGCCCGAA |
| | | GATTCGGCAGTCTACTACTGTCAGCATTACGAGTCCTCCCCTTCATGG |
| | | ACCTTCGGTCAAGGGACCAAAGTGGAGATCAAGACCACTACCCCAGCA |
| | | CCGAGGCCACCCACCCCGGCTCCTACCATCGCCTCCCAGCCTCTGTCC |
| | | CTGCGTCCGGAGGCATGTAGACCCGCAGCTGGTGGGGCCGTGCATACC |
| | | CGGGGTCTTGACTTCGCCTGCGATATCTACATTTGGGCCCCTCTGGCT |
| | | GGTACTTGCGGGGTCCTGCTGCTTTCACTCGTGATCACTCTTTACTGT |
| | | AAGCGCGGTCGGAAGAAGCTGCTGTACATCTTTAAGCAACCCTTCATG |
| | | AGGCCTGTGCAGACTACTCAAGAGGAGGACGGCTGTTCATGCCGGTTC |
| | | CCAGAGGAGGAGGAAGGCGGCTGCGAACTGCGCGTGAAATTCAGCCGC |
| | | AGCGCAGATGCTCCAGCCTACAAGCAGGGGCAGAACCAGCTCTACAAC |
| | | GAACTCAATCTTGGTCGGAGAGAGGAGTACGACGTGCTGGACAAGCGG |
| | | AGAGGACGGGACCCAGAAATGGGCGGGAAGCCGCGCAGAAAGAATCCC |
| | | CAAGAGGGCCTGTACAACGAGCTCCAAAAGGATAAGATGGCAGAAGCC |
| | | TATAGCGAGATTGGTATGAAAGGGGAACGCAGAAGAGGCAAAGGCCAC |
| | | GACGGACTGTACCAGGGACTCAGCACCGCCACCAAGGACACCTATGAC |
| | | GCTCTTCACATGCAGGCCCTGCCGCCTCGG |

BCMA_EBB-C1980-G4

| | | |
|---|---|---|
| BCMA_EBB- | 1141 | EVQLVESGGGLVQPGGSLRLSCAASGFTFSSYAMSWVRQAPGKGLEWV |
| C1980- | | SAISGSGGSTYYADSVKGRFTISRDNSKNTLYLQMNSLRAEDTAVYYC |
| G4-aa | | AKVVRDGMDVWGQGTTVTVSSGGGGSGGGGSGGGGSEIVLTQSPATLS |
| ScFv | | LSPGERATLSCRASQSVSSSYLAWYQQKPGQAPRLLIYGASSRATGIP |
| domain | | DRFSGNGSGTDFTLTISRLEPEDFAVYYCQQYGSPPRFTFGPGTKVDI |
| | | K |
| BCMA_EBB- | 1142 | GAGGTGCAGTTGGTCGAAAGCGGGGGCGGGCTTGTGCAGCCTGGCGGA |
| C1980- | | TCACTGCGGCTGTCCTGCGCGGCATCAGGCTTCACGTTTTCTTCCTAC |
| G4-nt | | GCCATGTCCTGGGTGCGCCAGGCCCCTGGAAAGGGACTGGAATGGGTG |
| ScFv | | TCCGCGATTTCGGGGTCCGGCGGGAGCACCTACTACGCCGATTCCGTG |
| domain | | AAGGGCCGCTTCACTATCTCGCGGGACAACTCCAAGAACACCCTCTAC |
| | | CTCCAAATGAATAGCCTGCGGGCCGAGGATACCGCCGTCTACTATTGC |
| | | GCTAAGGTCGTGCGCGACGGAATGGACGTGTGGGGACAGGGTACCACC |
| | | GTGACAGTGTCCTCGGGGGGAGGCGGTAGCGGCGGAGGAGGAAGCGGT |
| | | GGTGGAGGTTCCGAGATTGTGCTGACTCAATCACCCGCGACCCTGAGC |
| | | CTGTCCCCCGGCGAAAGGGCCACTCTGTCCTGTCGGGCCAGCCAATCA |
| | | GTCTCCTCCTCGTACCTGGCCTGGTACCAGCAGAAGCCAGGACAGGCT |
| | | CCGAGACTCCTTATCTATGGCGCATCCTCCCGCGCCACCGGAATCCCG |
| | | GATAGGTTCTCGGGAAACGGATCGGGGACCGACTTCACTCTCACCATC |
| | | TCCCGGCTGGAACCGGAGGACTTCGCCGTGTACTACTGCCAGCAGTAC |
| | | GGCAGCCCGCCTAGATTCACTTTCGGCCCCGGCACCAAAGTGGACATC |
| | | AAG |
| BCMA_EBB- | 1143 | EVQLVESGGGLVQPGGSLRLSCAASGFTFSSYAMSWVRQAPGKGLEWV |
| C1980- | | SAISGSGGSTYYADSVKGRFTISRDNSKNTLYLQMNSLRAEDTAVYYC |
| G4-aa | | AKVVRDGMDVWGQGTTVTVSS |
| VH | | |
| BCMA_EBB- | 1144 | EIVLTQSPATLSLSPGERATLSCRASQSVSSSYLAWYQQKPGQAPRLL |
| C1980- | | IYGASSRATGIPDRFSGNGSGTDFTLTISRLEPEDFAVYYCQQYGSPP |
| G4-aa | | RFTFGPGTKVDIK |
| VL | | |
| BCMA_EBB- | 1145 | MALPVTALLLPLALLLHAARPEVQLVESGGGLVQPGGSLRLSCAASGF |
| C1980- | | TFSSYAMSWVRQAPGKGLEWVSAISGSGGSTYYADSVKGRFTISRDNS |
| G4-aa | | KNTLYLQMNSLRAEDTAVYYCAKVVRDGMDVWGQGTTVTVSSGGGGSG |
| Full CART | | GGGSGGGGSEIVLTQSPATLSLSPGERATLSCRASQSVSSSYLAWYQQ |
| | | KPGQAPRLLIYGASSRATGIPDRFSGNGSGTDFTLTISRLEPEDFAVY |
| | | YCQQYGSPPRFTFGPGTKVDIKTTTPAPRPPTPAPTIASQPLSLRPEA |
| | | CRPAAGGAVHTRGLDFACDIYIWAPLAGTCGVLLLSLVITLYCKRGRK |
| | | KLLYIFKQPFMRPVQTTQEEDGCSCRFPEEEEGGCELRVKFSRSADAP |
| | | AYKQGQNQLYNELNLGRREEYDVLDKRRGRDPEMGGKPRRKNPQEGLY |
| | | NELQKDKMAEAYSEIGMKGERRRGKGHDGLYQGLSTATKDTYDALHMQ |
| | | ALPPR |
| BCMA_EBB- | 1146 | ATGGCCCTCCCTGTCACCGCCCTGCTGCTTCCGCTGGCTCTTCTGCTC |
| C1980- | | CACGCCGCTCGGCCCGAGGTGCAGTTGGTCGAAAGCGGGGGCGGGCTT |
| G4-nt | | GTGCAGCCTGGCGGATCACTGCGGCTGTCCTGCGCGGCATCAGGCTTC |
| Full CART | | ACGTTTTCTTCCTACGCCATGTCCTGGGTGCGCCAGGCCCCTGGAAAG |
| | | GGACTGGAATGGGTGTCCGCGATTTCGGGGTCCGGCGGGAGCACCTAC |
| | | TACGCCGATTCCGTGAAGGGCCGCTTCACTATCTCGCGGGACAACTCC |
| | | AAGAACACCCTCTACCTCCAAATGAATAGCCTGCGGGCCGAGGATACC |
| | | GCCGTCTACTATTGCGCTAAGGTCGTGCGCGACGGAATGGACGTGTGG |
| | | GGACAGGGTACCACCGTGACAGTGTCCTCGGGGGGAGGCGGTAGCGGC |
| | | GGAGGAGGAAGCGGTGGTGGAGGTTCCGAGATTGTGCTGACTCAATCA |
| | | CCCGCGACCCTGAGCCTGTCCCCCGGCGAAAGGGCCACTCTGTCCTGT |
| | | CGGGCCAGCCAATCAGTCTCCTCCTCGTACCTGGCCTGGTACCAGCAG |
| | | AAGCCAGGACAGGCTCCGAGACTCCTTATCTATGGCGCATCCTCCCGC |
| | | GCCACCGGAATCCCGGATAGGTTCTCGGGAAACGGATCGGGGACCGAC |
| | | TTCACTCTCACCATCTCCCGGCTGGAACCGGAGGACTTCGCCGTGTAC |
| | | TACTGCCAGCAGTACGGCAGCCCGCCTAGATTCACTTTCGGCCCCGGC |
| | | ACCAAAGTGGACATCAAGACCACTACCCCAGCACCGAGGCCACCCACC |
| | | CCGGCTCCTACCATCGCCTCCCAGCCTCTGTCCCTGCGTCCGGAGGCA |
| | | TGTAGACCCGCAGCTGGTGGGGCCGTGCATACCCGGGGTCTTGACTTC |
| | | GCCTGCGATATCTACATTTGGGCCCCTCTGGCTGGTACTTGCGGGGTC |
| | | CTGCTGCTTTCACTCGTGATCACTCTTTACTGTAAGCGCGGTCGGAAG |
| | | AAGCTGCTGTACATCTTTAAGCAACCCTTCATGAGGCCTGTGCAGACT |
| | | ACTCAAGAGGAGGACGGCTGTTCATGCCGGTTCCCAGAGGAGGAGGAA |
| | | GGCGGCTGCGAACTGCGCGTGAAATTCAGCCGCAGCGCAGATGCTCCA |
| | | GCCTACAAGCAGGGGCAGAACCAGCTCTACAACGAACTCAATCTTGGT |
| | | CGGAGAGAGGAGTACGACGTGCTGGACAAGCGGAGAGGACGGGACCCA |
| | | GAAATGGGCGGGAAGCCGCGCAGAAAGAATCCCCAAGAGGGCCTGTAC |
| | | AACGAGCTCCAAAAGGATAAGATGGCAGAAGCCTATAGCGAGATTGGT |
| | | ATGAAAGGGGAACGCAGAAGAGGCAAAGGCCACGACGGACTGTACCAG |
| | | GGACTCAGCACCGCCACCAAGGACACCTATGACGCTCTTCACATGCAG |
| | | GCCCTGCCGCCTCGG |

BCMA_EBB-C1980-D2

| | | |
|---|---|---|
| BCMA_EBB- | 1147 | EVQLLESGGGLVQPGGSLRLSCAASGFTFSSYAMSWVRQAPGKGLEWV |
| C1980- | | SAISGSGGSTYYADSVKGRFTISRDNSKNTLYLQMNSLRAEDTAVYYC |
| D2-aa | | AKIPQTGTEDYWGQGTLVTVSSGGGGSGGGGSGGGGSEIVLTQSPGTL |
| ScFv | | SLSPGERATLSCRASQSVSSSYLAWYQQRPGQAPRLLIYGASSRATGI |
| domain | | PDRFSGSGSGTDFTLTISRLEPEDFAVYYCQHYGSSPSWTFGQGTRLE |
| | | IK |
| BCMA_EBB- | 1148 | GAAGTGCAGCTGCTGGAGTCCGGCGGTGGATTGGTGCAACCGGGGGGA |
| C1980- | | TCGCTCAGACTGTCCTGTGCGGCGTCAGGCTTCACCTTCTCGAGCTAC |
| D2-nt | | GCCATGTCATGGGTCAGACAGGCCCCTGGAAAGGGTCTGGAATGGGTG |
| ScFv | | TCCGCCATTTCCGGGAGCGGGGGATCTACATACTACGCCGATAGCGTG |
| domain | | AAGGGCCGCTTCACCATTTCCCGGGACAACTCCAAGAACACTCTCTAT |
| | | CTGCAAATGAACTCCCTCCGCGCTGAGGACACTGCCGTGTACTACTGC |
| | | GCCAAAATCCCTCAGACCGGCACCTTCGACTACTGGGGACAGGGGACT |
| | | CTGGTCACCGTCAGCAGCGGTGGCGGAGGTTCGGGGGGAGGAGGAAGC |
| | | GGCGGCGGAGGGTCCGAGATTGTGCTGACCCAGTCACCCGGCACTTTG |
| | | TCCCTGTCGCCTGGAGAAAGGGCCACCCTTTCCTGCCGGGCATCCCAA |
| | | TCCGTGTCCTCCTCGTACCTGGCCTGGTACCAGCAGAGGCCCGGACAG |
| | | GCCCCACGGCTTCTGATCTACGGAGCAAGCAGCCGCGCGACCGGTATC |
| | | CCGGACCGGTTTTCGGGCTCGGGCTCAGGAACTGACTTCACCCTCACC |
| | | ATCTCCCGCCTGGAACCCGAAGATTTCGCTGTGTATTACTGCCAGCAC |
| | | TACGGCAGCTCCCCGTCCTGGACGTTCGGCCAGGGAACTCGGCTGGAG |
| | | ATCAAG |
| BCMA_EBB- | 1149 | EVQLLESGGGLVQPGGSLRLSCAASGFTFSSYAMSWVRQAPGKGLEWV |
| C1980- | | SAISGSGGSTYYADSVKGRFTISRDNSKNTLYLQMNSLRAEDTAVYYC |
| D2-aa | | AKIPQTGTEDYWGQGTLVTVSS |
| VH | | |
| BCMA_EBB- | 1150 | EIVLTQSPGTLSLSPGERATLSCRASQSVSSSYLAWYQQRPGQAPRLL |
| C1980- | | IYGASSRATGIPDRFSGSGSGTDFTLTISRLEPEDFAVYYCQHYGSSP |
| D2-aa | | SWTFGQGTRLEIK |
| VL | | |
| BCMA_EBB- | 1151 | MALPVTALLLPLALLLHAARPEVQLLESGGGLVQPGGSLRLSCAASGF |
| C1980- | | TESSYAMSWVRQAPGKGLEWVSAISGSGGSTYYADSVKGRFTISRDNS |
| D2-aa | | KNTLYLQMNSLRAEDTAVYYCAKIPQTGTEDYWGQGTLVTVSSGGGGS |
| Full CART | | GGGGSGGGGSEIVLTQSPGTLSLSPGERATLSCRASQSVSSSYLAWYQ |
| | | QRPGQAPRLLIYGASSRATGIPDRFSGSGSGTDFTLTISRLEPEDFAV |
| | | YYCQHYGSSPSWTFGQGTRLEIKTTTPAPRPPTPAPTIASQPLSLRPE |
| | | ACRPAAGGAVHTRGLDFACDIYIWAPLAGTCGVLLLSLVITLYCKRGR |
| | | KKLLYIFKQPFMRPVQTTQEEDGCSCRFPEEEEGGCELRVKFSRSADA |
| | | PAYKQGQNQLYNELNLGRREEYDVLDKRRGRDPEMGGKPRRKNPQEGL |
| | | YNELQKDKMAEAYSEIGMKGERRRGKGHDGLYQGLSTATKDTYDALHM |
| | | QALPPR |
| BCMA_EBB- | 1152 | ATGGCCCTCCCTGTCACCGCCCTGCTGCTTCCGCTGGCTCTTCTGCTC |
| C1980- | | CACGCCGCTCGGCCCGAAGTGCAGCTGCTGGAGTCCGGCGGTGGATTG |
| D2-nt | | GTGCAACCGGGGGGATCGCTCAGACTGTCCTGTGCGGCGTCAGGCTTC |
| Full CART | | ACCTTCTCGAGCTACGCCATGTCATGGGTCAGACAGGCCCCTGGAAAG |
| | | GGTCTGGAATGGGTGTCCGCCATTTCCGGGAGCGGGGGATCTACATAC |
| | | TACGCCGATAGCGTGAAGGGCCGCTTCACCATTTCCCGGGACAACTCC |
| | | AAGAACACTCTCTATCTGCAAATGAACTCCCTCCGCGCTGAGGACACT |
| | | GCCGTGTACTACTGCGCCAAAATCCCTCAGACCGGCACCTTCGACTAC |
| | | TGGGGACAGGGGACTCTGGTCACCGTCAGCAGCGGTGGCGGAGGTTCG |
| | | GGGGGAGGAGGAAGCGGCGGCGGAGGGTCCGAGATTGTGCTGACCCAG |
| | | TCACCCGGCACTTTGTCCCTGTCGCCTGGAGAAAGGGCCACCCTTTCC |
| | | TGCCGGGCATCCCAATCCGTGTCCTCCTCGTACCTGGCCTGGTACCAG |
| | | CAGAGGCCCGGACAGGCCCCACGGCTTCTGATCTACGGAGCAAGCAGC |
| | | CGCGCGACCGGTATCCCGGACCGGTTTTCGGGCTCGGGCTCAGGAACT |
| | | GACTTCACCCTCACCATCTCCCGCCTGGAACCCGAAGATTTCGCTGTG |
| | | TATTACTGCCAGCACTACGGCAGCTCCCCGTCCTGGACGTTCGGCCAG |
| | | GGAACTCGGCTGGAGATCAAGACCACTACCCCAGCACCGAGGCCACCC |
| | | ACCCCGGCTCCTACCATCGCCTCCCAGCCTCTGTCCCTGCGTCCGGAG |
| | | GCATGTAGACCCGCAGCTGGTGGGGCCGTGCATACCCGGGGTCTTGAC |
| | | TTCGCCTGCGATATCTACATTTGGGCCCCTCTGGCTGGTACTTGCGGG |
| | | GTCCTGCTGCTTTCACTCGTGATCACTCTTTACTGTAAGCGCGGTCGG |
| | | AAGAAGCTGCTGTACATCTTTAAGCAACCCTTCATGAGGCCTGTGCAG |
| | | ACTACTCAAGAGGAGGACGGCTGTTCATGCCGGTTCCCAGAGGAGGAG |
| | | GAAGGCGGCTGCGAACTGCGCGTGAAATTCAGCCGCAGCGCAGATGCT |
| | | CCAGCCTACAAGCAGGGGCAGAACCAGCTCTACAACGAACTCAATCTT |
| | | GGTCGGAGAGAGGAGTACGACGTGCTGGACAAGCGGAGAGGACGGGAC |
| | | CCAGAAATGGGCGGGAAGCCGCGCAGAAAGAATCCCCAAGAGGGCCTG |
| | | TACAACGAGCTCCAAAAGGATAAGATGGCAGAAGCCTATAGCGAGATT |
| | | GGTATGAAAGGGGAACGCAGAAGAGGCAAAGGCCACGACGGACTGTAC |
| | | CAGGGACTCAGCACCGCCACCAAGGACACCTATGACGCTCTTCACATG |
| | | CAGGCCCTGCCGCCTCGG |

BCMA_EBB-C1978-A10

| | | |
|---|---|---|
| BCMA_EBB- | 1153 | EVQLVETGGGLVQPGGSLRLSCAASGFTFSSYAMSWVRQAPGKGLEWV |
| C1978- | | SAISGSGGSTYYADSVKGRFTMSRENDKNSVFLQMNSLRVEDTGVYYC |
| A10-aa | | ARANYKRELRYYYGMDVWGQGTMVTVSSGGGGSGGGGSGGGGSEIVMT |
| ScFv | | QSPGTLSLSPGESATLSCRASQRVASNYLAWYQHKPGQAPSLLISGAS |
| domain | | SRATGVPDRFSGSGSGTDFTLAISRLEPEDSAVYYCQHYDSSPSWTFG |
| | | QGTKVEIK |
| BCMA_EBB- | 1154 | GAAGTGCAACTGGTGGAAACCGGTGGAGGACTCGTGCAGCCTGGCGGC |
| C1978- | | AGCCTCCGGCTGAGCTGCGCCGCTTCGGGATTCACCTTTTCCTCCTAC |
| A10-nt | | GCGATGTCTTGGGTCAGACAGGCCCCCGGAAAGGGGCTGGAATGGGTG |
| ScFv | | TCAGCCATCTCCGGCTCCGGCGGATCAACGTACTACGCCGACTCCGTG |
| domain | | AAAGGCCGGTTCACCATGTCGCGCGAGAATGACAAGAACTCCGTGTTC |
| | | CTGCAAATGAACTCCCTGAGGGTGGAGGACACCGGAGTGTACTATTGT |
| | | GCGCGCGCCAACTACAAGAGAGAGCTGCGGTACTACTACGGAATGGAC |
| | | GTCTGGGGACAGGGAACTATGGTGACCGTGTCATCCGGTGGAGGGGGA |
| | | AGCGGCGGTGGAGGCAGCGGGGGCGGGGGTTCAGAAATTGTCATGACC |
| | | CAGTCCCCGGGAACTCTTTCCCTCTCCCCCGGGGAATCCGCGACTTTG |
| | | TCCTGCCGGGCCAGCCAGCGCGTGGCCTCGAACTACCTCGCATGGTAC |
| | | CAGCATAAGCCAGGCCAAGCCCCTTCCCTGCTGATTTCCGGGGCTAGC |
| | | AGCCGCGCCACTGGCGTGCCGGATAGGTTCTCGGGAAGCGGCTCGGGT |
| | | ACCGATTTCACCCTGGCAATCTCGCGGCTGGAACCGGAGGATTCGGCC |
| | | GTGTACTACTGCCAGCACTATGACTCATCCCCCTCCTGGACATTCGGA |
| | | CAGGGCACCAAGGTCGAGATCAAG |
| BCMA_EBB- | 1155 | EVQLVETGGGLVQPGGSLRLSCAASGFTFSSYAMSWVRQAPGKGLEWV |
| C1978- | | SAISGSGGSTYYADSVKGRFTMSRENDKNSVFLQMNSLRVEDTGVYYC |
| A10-aa | | ARANYKRELRYYYGMDVWGQGTMVTVSS |
| VH | | |
| BCMA_EBB- | 1156 | EIVMTQSPGTLSLSPGESATLSCRASQRVASNYLAWYQHKPGQAPSLL |
| C1978- | | ISGASSRATGVPDRFSGSGSGTDFTLAISRLEPEDSAVYYCQHYDSSP |
| A10-aa | | SWTFGQGTKVEIK |
| VL | | |
| BCMA_EBB- | 1157 | MALPVTALLLPLALLLHAARPEVQLVETGGGLVQPGGSLRLSCAASGF |
| C1978- | | TFSSYAMSWVRQAPGKGLEWVSAISGSGGSTYYADSVKGRFTMSREND |
| A10-aa | | KNSVFLQMNSLRVEDTGVYYCARANYKRELRYYYGMDVWGQGTMVTVS |
| Full CART | | SGGGGSGGGGSGGGGSEIVMTQSPGTLSLSPGESATLSCRASQRVASN |
| | | YLAWYQHKPGQAPSLLISGASSRATGVPDRFSGSGSGTDFTLAISRLE |
| | | PEDSAVYYCQHYDSSPSWTFGQGTKVEIKTTTPAPRPPTPAPTIASQP |
| | | LSLRPEACRPAAGGAVHTRGLDFACDIYIWAPLAGTCGVLLLSLVITL |
| | | YCKRGRKKLLYIFKQPFMRPVQTTQEEDGCSCRFPEEEEGGCELRVKF |
| | | SRSADAPAYKQGQNQLYNELNLGRREEYDVLDKRRGRDPEMGGKPRRK |
| | | NPQEGLYNELQKDKMAEAYSEIGMKGERRRGKGHDGLYQGLSTATKDT |
| | | YDALHMQALPPR |
| BCMA_EBB- | 1158 | ATGGCCCTCCCTGTCACCGCCCTGCTGCTTCCGCTGGCTCTTCTGCTC |
| C1978- | | CACGCCGCTCGGCCCGAAGTGCAACTGGTGGAAACCGGTGGAGGACTC |
| A10-nt | | GTGCAGCCTGGCGGCAGCCTCCGGCTGAGCTGCGCCGCTTCGGGATTC |
| Full CART | | ACCTTTTCCTCCTACGCGATGTCTTGGGTCAGACAGGCCCCCGGAAAG |
| | | GGGCTGGAATGGGTGTCAGCCATCTCCGGCTCCGGCGGATCAACGTAC |
| | | TACGCCGACTCCGTGAAAGGCCGGTTCACCATGTCGCGCGAGAATGAC |
| | | AAGAACTCCGTGTTCCTGCAAATGAACTCCCTGAGGGTGGAGGACACC |
| | | GGAGTGTACTATTGTGCGCGCGCCAACTACAAGAGAGAGCTGCGGTAC |
| | | TACTACGGAATGGACGTCTGGGGACAGGGAACTATGGTGACCGTGTCA |
| | | TCCGGTGGAGGGGGAAGCGGCGGTGGAGGCAGCGGGGGCGGGGGTTCA |
| | | GAAATTGTCATGACCCAGTCCCCGGGAACTCTTTCCCTCTCCCCCGGG |
| | | GAATCCGCGACTTTGTCCTGCCGGGCCAGCCAGCGCGTGGCCTCGAAC |
| | | TACCTCGCATGGTACCAGCATAAGCCAGGCCAAGCCCCTTCCCTGCTG |
| | | ATTTCCGGGGCTAGCAGCCGCGCCACTGGCGTGCCGGATAGGTTCTCG |
| | | GGAAGCGGCTCGGGTACCGATTTCACCCTGGCAATCTCGCGGCTGGAA |
| | | CCGGAGGATTCGGCCGTGTACTACTGCCAGCACTATGACTCATCCCCC |
| | | TCCTGGACATTCGGACAGGGCACCAAGGTCGAGATCAAGACCACTACC |
| | | CCAGCACCGAGGCCACCCACCCCGGCTCCTACCATCGCCTCCCAGCCT |
| | | CTGTCCCTGCGTCCGGAGGCATGTAGACCCGCAGCTGGTGGGGCCGTG |
| | | CATACCCGGGGTCTTGACTTCGCCTGCGATATCTACATTTGGGCCCCT |
| | | CTGGCTGGTACTTGCGGGGTCCTGCTGCTTTCACTCGTGATCACTCTT |
| | | TACTGTAAGCGCGGTCGGAAGAAGCTGCTGTACATCTTTAAGCAACCC |
| | | TTCATGAGGCCTGTGCAGACTACTCAAGAGGAGGACGGCTGTTCATGC |
| | | CGGTTCCCAGAGGAGGAGGAAGGCGGCTGCGAACTGCGCGTGAAATTC |
| | | AGCCGCAGCGCAGATGCTCCAGCCTACAAGCAGGGGCAGAACCAGCTC |
| | | TACAACGAACTCAATCTTGGTCGGAGAGAGGAGTACGACGTGCTGGAC |
| | | AAGCGGAGAGGACGGGACCCAGAAATGGGCGGGAAGCCGCGCAGAAAG |
| | | AATCCCCAAGAGGGCCTGTACAACGAGCTCCAAAAGGATAAGATGGCA |
| | | GAAGCCTATAGCGAGATTGGTATGAAAGGGGAACGCAGAAGAGGCAAA |
| | | GGCCACGACGGACTGTACCAGGGACTCAGCACCGCCACCAAGGACACC |
| | | TATGACGCTCTTCACATGCAGGCCCTGCCGCCTCGG |

BCMA_EBB-C1978-D4

| | | |
|---|---|---|
| BCMA_EBB- | 1159 | EVQLLETGGGLVQPGGSLRLSCAASGFSFSSYAMSWVRQAPGKGLEWV |
| C1978- | | SAISGSGGSTYYADSVKGRFTISRDNSKNTLYLQMNSLRAEDTAVYYC |
| D4-aa | | AKALVGATGAFDIWGQGTLVTVSSGGGGSGGGGSGGGGSEIVLTQSPG |
| ScFv | | TLSLSPGERATLSCRASQSLSSNFLAWYQQKPGQAPGLLIYGASNWAT |
| domain | | GTPDRFSGSGSGTDFTLTITRLEPEDFAVYYCQYYGTSPMYTFGQGTK |
| | | VEIK |
| BCMA_EBB- | 1160 | GAAGTGCAGCTGCTCGAAACCGGTGGAGGGCTGGTGCAGCCAGGGGGC |
| C1978- | | TCCCTGAGGCTTTCATGCGCCGCTAGCGGATTCTCCTTCTCCTCTTAC |
| D4-nt | | GCCATGTCGTGGGTCCGCCAAGCCCCTGGAAAAGGCCTGGAATGGGTG |
| ScFv | | TCCGCGATTTCCGGGAGCGGAGGTTCGACCTATTACGCCGACTCCGTG |
| domain | | AAGGGCCGCTTTACCATCTCCCGGGATAACTCCAAGAACACTCTGTAC |
| | | CTCCAAATGAACTCGCTGAGAGCCGAGGACACCGCCGTGTATTACTGC |
| | | GCGAAGGCGCTGGTCGGCGCGACTGGGGCATTCGACATCTGGGGACAG |
| | | GGAACTCTTGTGACCGTGTCGAGCGGAGGCGGCGGCTCCGGCGGAGGA |
| | | GGGAGCGGGGGCGGTGGTTCCGAAATCGTGTTGACTCAGTCCCCGGGA |
| | | ACCCTGAGCTTGTCACCCGGGGAGCGGGCCACTCTCTCCTGTCGCGCC |
| | | TCCCAATCGCTCTCATCCAATTTCCTGGCCTGGTACCAGCAGAAGCCC |
| | | GGACAGGCCCCGGGCCTGCTCATCTACGGCGCTTCAAACTGGGCAACG |
| | | GGAACCCCTGATCGGTTCAGCGGAAGCGGATCGGGTACTGACTTTACC |
| | | CTGACCATCACCAGACTGGAACCGGAGGACTTCGCCGTGTACTACTGC |
| | | CAGTACTACGGCACCTCCCCCATGTACACATTCGGACAGGGTACCAAG |
| | | GTCGAGATTAAG |
| BCMA_EBB- | 1161 | EVQLLETGGGLVQPGGSLRLSCAASGFSFSSYAMSWVRQAPGKGLEWV |
| C1978- | | SAISGSGGSTYYADSVKGRFTISRDNSKNTLYLQMNSLRAEDTAVYYC |
| D4-aa | | AKALVGATGAFDIWGQGTLVTVSS |
| VH | | |
| BCMA_EBB- | 1162 | EIVLTQSPGTLSLSPGERATLSCRASQSLSSNFLAWYQQKPGQAPGLL |
| C1978- | | IYGASNWATGTPDRFSGSGSGTDFTLTITRLEPEDFAVYYCQYYGTSP |
| D4-aa | | MYTFGQGTKVEIK |
| VL | | |
| BCMA_EBB- | 1163 | MALPVTALLLPLALLLHAARPEVQLLETGGGLVQPGGSLRLSCAASGF |
| C1978- | | SESSYAMSWVRQAPGKGLEWVSAISGSGGSTYYADSVKGRFTISRDNS |
| D4-aa | | KNTLYLQMNSLRAEDTAVYYCAKALVGATGAFDIWGQGTLVTVSSGGG |
| Full CART | | GSGGGGSGGGGSEIVLTQSPGTLSLSPGERATLSCRASQSLSSNFLAW |
| | | YQQKPGQAPGLLIYGASNWATGTPDRFSGSGSGTDFTLTITRLEPEDE |
| | | AVYYCQYYGTSPMYTFGQGTKVEIKTTTPAPRPPTPAPTIASQPLSLR |
| | | PEACRPAAGGAVHTRGLDFACDIYIWAPLAGTCGVLLLSLVITLYCKR |
| | | GRKKLLYIFKQPFMRPVQTTQEEDGCSCRFPEEEEGGCELRVKFSRSA |
| | | DAPAYKQGQNQLYNELNLGRREEYDVLDKRRGRDPEMGGKPRRKNPQE |
| | | GLYNELQKDKMAEAYSEIGMKGERRRGKGHDGLYQGLSTATKDTYDAL |
| | | HMQALPPR |
| BCMA_EBB- | 1164 | ATGGCCCTCCCTGTCACCGCCCTGCTGCTTCCGCTGGCTCTTCTGCTC |
| C1978- | | CACGCCGCTCGGCCCGAAGTGCAGCTGCTCGAAACCGGTGGAGGGCTG |
| D4-nt | | GTGCAGCCAGGGGGCTCCCTGAGGCTTTCATGCGCCGCTAGCGGATTC |
| Full CART | | TCCTTCTCCTCTTACGCCATGTCGTGGGTCCGCCAAGCCCCTGGAAAA |
| | | GGCCTGGAATGGGTGTCCGCGATTTCCGGGAGCGGAGGTTCGACCTAT |
| | | TACGCCGACTCCGTGAAGGGCCGCTTTACCATCTCCCGGGATAACTCC |
| | | AAGAACACTCTGTACCTCCAAATGAACTCGCTGAGAGCCGAGGACACC |
| | | GCCGTGTATTACTGCGCGAAGGCGCTGGTCGGCGCGACTGGGGCATTC |
| | | GACATCTGGGGACAGGGAACTCTTGTGACCGTGTCGAGCGGAGGCGGC |
| | | GGCTCCGGCGGAGGAGGGAGCGGGGGCGGTGGTTCCGAAATCGTGTTG |
| | | ACTCAGTCCCCGGGAACCCTGAGCTTGTCACCCGGGGAGCGGGCCACT |
| | | CTCTCCTGTCGCGCCTCCCAATCGCTCTCATCCAATTTCCTGGCCTGG |
| | | TACCAGCAGAAGCCCGGACAGGCCCCGGGCCTGCTCATCTACGGCGCT |
| | | TCAAACTGGGCAACGGGAACCCCTGATCGGTTCAGCGGAAGCGGATCG |
| | | GGTACTGACTTTACCCTGACCATCACCAGACTGGAACCGGAGGACTTC |
| | | GCCGTGTACTACTGCCAGTACTACGGCACCTCCCCCATGTACACATTC |
| | | GGACAGGGTACCAAGGTCGAGATTAAGACCACTACCCCAGCACCGAGG |
| | | CCACCCACCCCGGCTCCTACCATCGCCTCCCAGCCTCTGTCCCTGCGT |
| | | CCGGAGGCATGTAGACCCGCAGCTGGTGGGGCCGTGCATACCCGGGGT |
| | | CTTGACTTCGCCTGCGATATCTACATTTGGGCCCCTCTGGCTGGTACT |
| | | TGCGGGGTCCTGCTGCTTTCACTCGTGATCACTCTTTACTGTAAGCGC |
| | | GGTCGGAAGAAGCTGCTGTACATCTTTAAGCAACCCTTCATGAGGCCT |
| | | GTGCAGACTACTCAAGAGGAGGACGGCTGTTCATGCCGGTTCCCAGAG |
| | | GAGGAGGAAGGCGGCTGCGAACTGCGCGTGAAATTCAGCCGCAGCGCA |
| | | GATGCTCCAGCCTACAAGCAGGGGCAGAACCAGCTCTACAACGAACTC |
| | | AATCTTGGTCGGAGAGAGGAGTACGACGTGCTGGACAAGCGGAGAGGA |
| | | CGGGACCCAGAAATGGGCGGGAAGCCGCGCAGAAAGAATCCCCAAGAG |
| | | GGCCTGTACAACGAGCTCCAAAAGGATAAGATGGCAGAAGCCTATAGC |
| | | GAGATTGGTATGAAAGGGGAACGCAGAAGAGGCAAAGGCCACGACGGA |
| | | CTGTACCAGGGACTCAGCACCGCCACCAAGGACACCTATGACGCTCTT |
| | | CACATGCAGGCCCTGCCGCCTCGG |

BCMA_EBB-C1980-A2

| | | |
|---|---|---|
| BCMA_EBB- | 1165 | EVQLLESGGGLVQPGGSLRLSCAASGFTFSSYAMSWVRQAPGKGLEWV |
| C1980- | | SAISGSGGSTYYADSVKGRFTISRDNSKNTLYLQMNSLRAEDTAVYYC |
| A2-aa | | VLWFGEGFDPWGQGTLVTVSSGGGGSGGGGSGGGGSDIVLTQSPLSLP |
| ScFv | | VTPGEPASISCRSSQSLLHSNGYNYLDWYLQKPGQSPQLLIYLGSNRA |
| domain | | SGVPDRFSGSGSGTDFTLKISRVEAEDVGVYYCMQALQTPLTFGGGTK |
| | | VDIK |
| BCMA_EBB- | 1166 | GAAGTGCAGCTGCTTGAGAGCGGTGGAGGTCTGGTGCAGCCCGGGGGA |
| C1980- | | TCACTGCGCCTGTCCTGTGCCGCGTCCGGTTTCACTTTCTCCTCGTAC |
| A2-nt | | GCCATGTCGTGGGTCAGACAGGCACCGGGAAAGGGACTGGAATGGGTG |
| ScFv | | TCAGCCATTTCGGGTTCGGGGGGCAGCACCTACTACGCTGACTCCGTG |
| domain | | AAGGGCCGGTTCACCATTTCCCGCGACAACTCCAAGAACACCTTGTAC |
| | | CTCCAAATGAACTCCCTGCGGGCCGAAGATACCGCCGTGTATTACTGC |
| | | GTGCTGTGGTTCGGAGAGGGATTCGACCCGTGGGGACAAGGAACACTC |
| | | GTGACTGTGTCATCCGGCGGAGGCGGCAGCGGTGGCGGCGGTTCCGGC |
| | | GGCGGCGGATCTGACATCGTGTTGACCCAGTCCCCTCTGAGCCTGCCG |
| | | GTCACTCCTGGCGAACCAGCCAGCATCTCCTGCCGGTCGAGCCAGTCC |
| | | CTCCTGCACTCCAATGGGTACAACTACCTCGATTGGTATCTGCAAAAG |
| | | CCGGGCCAGAGCCCCCAGCTGCTGATCTACCTTGGGTCAAACCGCGCT |
| | | TCCGGGGTGCCTGATAGATTCTCCGGGTCCGGGAGCGGAACCGACTTT |
| | | ACCCTGAAAATCTCGAGGGTGGAGGCCGAGGACGTCGGAGTGTACTAC |
| | | TGCATGCAGGCGCTCCAGACTCCCCTGACCTTCGGAGGAGGAACGAAG |
| | | GTCGACATCAAGA |
| BCMA_EBB- | 1167 | EVQLLESGGGLVQPGGSLRLSCAASGFTFSSYAMSWVRQAPGKGLEWV |
| C1980- | | SAISGSGGSTYYADSVKGRFTISRDNSKNTLYLQMNSLRAEDTAVYYC |
| A2-aa | | VLWFGEGFDPWGQGTLVTVSS |
| VH | | |
| BCMA_EBB- | 1168 | DIVLTQSPLSLPVTPGEPASISCRSSQSLLHSNGYNYLDWYLQKPGQS |
| C1980- | | PQLLIYLGSNRASGVPDRFSGSGSGTDFTLKISRVEAEDVGVYYCMQA |
| A2-aa | | LQTPLTFGGGTKVDIK |
| VL | | |
| BCMA_EBB- | 1169 | MALPVTALLLPLALLLHAARPEVQLLESGGGLVQPGGSLRLSCAASGF |
| C1980- | | TFSSYAMSWVRQAPGKGLEWVSAISGSGGSTYYADSVKGRFTISRDNS |
| A2-aa | | KNTLYLQMNSLRAEDTAVYYCVLWFGEGFDPWGQGTLVTVSSGGGGSG |
| Full CART | | GGGSGGGGSDIVLTQSPLSLPVTPGEPASISCRSSQSLLHSNGYNYLD |
| | | WYLQKPGQSPQLLIYLGSNRASGVPDRFSGSGSGTDFTLKISRVEAED |
| | | VGVYYCMQALQTPLTFGGGTKVDIKTTTPAPRPPTPAPTIASQPLSLR |
| | | PEACRPAAGGAVHTRGLDFACDIYIWAPLAGTCGVLLLSLVITLYCKR |
| | | GRKKLLYIFKQPFMRPVQTTQEEDGCSCRFPEEEEGGCELRVKFSRSA |
| | | DAPAYKQGQNQLYNELNLGRREEYDVLDKRRGRDPEMGGKPRRKNPQE |
| | | GLYNELQKDKMAEAYSEIGMKGERRRGKGHDGLYQGLSTATKDTYDAL |
| | | HMQALPPR |
| BCMA_EBB- | 1170 | ATGGCCCTCCCTGTCACCGCCCTGCTGCTTCCGCTGGCTCTTCTGCTC |
| C1980- | | CACGCCGCTCGGCCCGAAGTGCAGCTGCTTGAGAGCGGTGGAGGTCTG |
| A2-nt | | GTGCAGCCCGGGGGATCACTGCGCCTGTCCTGTGCCGCGTCCGGTTTC |
| Full CART | | ACTTTCTCCTCGTACGCCATGTCGTGGGTCAGACAGGCACCGGGAAAG |
| | | GGACTGGAATGGGTGTCAGCCATTTCGGGTTCGGGGGGCAGCACCTAC |
| | | TACGCTGACTCCGTGAAGGGCCGGTTCACCATTTCCCGCGACAACTCC |
| | | AAGAACACCTTGTACCTCCAAATGAACTCCCTGCGGGCCGAAGATACC |
| | | GCCGTGTATTACTGCGTGCTGTGGTTCGGAGAGGGATTCGACCCGTGG |
| | | GGACAAGGAACACTCGTGACTGTGTCATCCGGCGGAGGCGGCAGCGGT |
| | | GGCGGCGGTTCCGGCGGCGGCGGATCTGACATCGTGTTGACCCAGTCC |
| | | CCTCTGAGCCTGCCGGTCACTCCTGGCGAACCAGCCAGCATCTCCTGC |
| | | CGGTCGAGCCAGTCCCTCCTGCACTCCAATGGGTACAACTACCTCGAT |
| | | TGGTATCTGCAAAAGCCGGGCCAGAGCCCCCAGCTGCTGATCTACCTT |
| | | GGGTCAAACCGCGCTTCCGGGGTGCCTGATAGATTCTCCGGGTCCGGG |
| | | AGCGGAACCGACTTTACCCTGAAAATCTCGAGGGTGGAGGCCGAGGAC |
| | | GTCGGAGTGTACTACTGCATGCAGGCGCTCCAGACTCCCCTGACCTTC |
| | | GGAGGAGGAACGAAGGTCGACATCAAGACCACTACCCCAGCACCGAGG |
| | | CCACCCACCCCGGCTCCTACCATCGCCTCCCAGCCTCTGTCCCTGCGT |
| | | CCGGAGGCATGTAGACCCGCAGCTGGTGGGGCCGTGCATACCCGGGGT |
| | | CTTGACTTCGCCTGCGATATCTACATTTGGGCCCCTCTGGCTGGTACT |
| | | TGCGGGGTCCTGCTGCTTTCACTCGTGATCACTCTTTACTGTAAGCGC |
| | | GGTCGGAAGAAGCTGCTGTACATCTTTAAGCAACCCTTCATGAGGCCT |
| | | GTGCAGACTACTCAAGAGGAGGACGGCTGTTCATGCCGGTTCCCAGAG |
| | | GAGGAGGAAGGCGGCTGCGAACTGCGCGTGAAATTCAGCCGCAGCGCA |
| | | GATGCTCCAGCCTACAAGCAGGGGCAGAACCAGCTCTACAACGAACTC |
| | | AATCTTGGTCGGAGAGAGGAGTACGACGTGCTGGACAAGCGGAGAGGA |
| | | CGGGACCCAGAAATGGGCGGGAAGCCGCGCAGAAAGAATCCCCAAGAG |
| | | GGCCTGTACAACGAGCTCCAAAAGGATAAGATGGCAGAAGCCTATAGC |
| | | GAGATTGGTATGAAAGGGGAACGCAGAAGAGGCAAAGGCCACGACGGA |
| | | CTGTACCAGGGACTCAGCACCGCCACCAAGGACACCTATGACGCTCTT |
| | | CACATGCAGGCCCTGCCGCCTCGG |

BCMA_EBB-C1981-C3

| | | |
|---|---|---|
| BCMA_EBB- | 1171 | QVQLVESGGGLVQPGGSLRLSCAASGFTFSSYAMSWVRQAPGKGLEWV |
| C1981- | | SAISGSGGSTYYADSVKGRFTISRDNSKNTLYLQMNSLRAEDTAVYYC |
| C3-aa | | AKVGYDSSGYYRDYYGMDVWGQGTTVTVSSGGGGSGGGGSGGGGSEIV |
| ScFv | | LTQSPGTLSLSPGERATLSCRASQSVSSSYLAWYQQKPGQAPRLLIYG |
| domain | | TSSRATGISDRESGSGSGTDFTLTISRLEPEDFAVYYCQHYGNSPPKF |
| | | TFGPGTKLEIK |
| BCMA_EBB- | 1172 | CAAGTGCAGCTCGTGGAGTCAGGCGGAGGACTGGTGCAGCCCGGGGGC |
| C1981- | | TCCCTGAGACTTTCCTGCGCGGCATCGGGTTTTACCTTCTCCTCCTAT |
| C3-nt | | GCTATGTCCTGGGTGCGCCAGGCCCCGGGAAAGGGACTGGAATGGGTG |
| ScFv | | TCCGCAATCAGCGGTAGCGGGGGCTCAACATACTACGCCGACTCCGTC |
| domain | | AAGGGTCGCTTCACTATTTCCCGGGACAACTCCAAGAATACCCTGTAC |
| | | CTCCAAATGAACAGCCTCAGGGCCGAGGATACTGCCGTGTACTACTGC |
| | | GCCAAAGTCGGATACGATAGCTCCGGTTACTACCGGGACTACTACGGA |
| | | ATGGACGTGTGGGGACAGGGCACCACCGTGACCGTGTCAAGCGGCGGA |
| | | GGCGGTTCAGGAGGGGGAGGCTCCGGCGGTGGAGGGTCCGAAATCGTC |
| | | CTGACTCAGTCGCCTGGCACTCTGTCGTTGTCCCCGGGGGAGCGCGCT |
| | | ACCCTGTCGTGTCGGGCGTCGCAGTCCGTGTCGAGCTCCTACCTCGCG |
| | | TGGTACCAGCAGAAGCCCGGACAGGCCCCTAGACTTCTGATCTACGGC |
| | | ACTTCTTCACGCGCCACCGGGATCAGCGACAGGTTCAGCGGCTCCGGC |
| | | TCCGGGACCGACTTCACCCTGACCATTAGCCGGCTGGAGCCTGAAGAT |
| | | TTCGCCGTGTATTACTGCCAACACTACGGAAACTCGCCGCCAAAGTTC |
| | | ACGTTCGGACCCGGAACCAAGCTGGAAATCAAG |
| BCMA_EBB- | 1173 | QVQLVESGGGLVQPGGSLRLSCAASGFTFSSYAMSWVRQAPGKGLEWV |
| C1981- | | SAISGSGGSTYYADSVKGRFTISRDNSKNTLYLQMNSLRAEDTAVYYC |
| C3-aa | | AKVGYDSSGYYRDYYGMDVWGQGTTVTVSS |
| VH | | |
| BCMA_EBB- | 1174 | EIVLTQSPGTLSLSPGERATLSCRASQSVSSSYLAWYQQKPGQAPRLL |
| C1981- | | IYGTSSRATGISDRESGSGSGTDFTLTISRLEPEDFAVYYCQHYGNSP |
| C3-aa | | PKFTFGPGTKLEIK |
| VL | | |
| BCMA_EBB- | 1175 | MALPVTALLLPLALLLHAARPQVQLVESGGGLVQPGGSLRLSCAASGF |
| C1981- | | TESSYAMSWVRQAPGKGLEWVSAISGSGGSTYYADSVKGRFTISRDNS |
| C3-aa | | KNTLYLQMNSLRAEDTAVYYCAKVGYDSSGYYRDYYGMDVWGQGTTVT |
| Full CART | | VSSGGGGSGGGGSGGGGSEIVLTQSPGTLSLSPGERATLSCRASQSVS |
| | | SSYLAWYQQKPGQAPRLLIYGTSSRATGISDRFSGSGSGTDFTLTISR |
| | | LEPEDFAVYYCQHYGNSPPKFTFGPGTKLEIKTTTPAPRPPTPAPTIA |
| | | SQPLSLRPEACRPAAGGAVHTRGLDFACDIYIWAPLAGTCGVLLLSLV |
| | | ITLYCKRGRKKLLYIFKQPFMRPVQTTQEEDGCSCRFPEEEEGGCELR |
| | | VKFSRSADAPAYKQGQNQLYNELNLGRREEYDVLDKRRGRDPEMGGKP |
| | | RRKNPQEGLYNELQKDKMAEAYSEIGMKGERRRGKGHDGLYQGLSTAT |
| | | KDTYDALHMQALPPR |
| BCMA_EBB- | 1176 | ATGGCCCTCCCTGTCACCGCCCTGCTGCTTCCGCTGGCTCTTCTGCTC |
| C1981- | | CACGCCGCTCGGCCCCAAGTGCAGCTCGTGGAGTCAGGCGGAGGACTG |
| C3-nt | | GTGCAGCCCGGGGGCTCCCTGAGACTTTCCTGCGCGGCATCGGGTTTT |
| Full CART | | ACCTTCTCCTCCTATGCTATGTCCTGGGTGCGCCAGGCCCCGGGAAAG |
| | | GGACTGGAATGGGTGTCCGCAATCAGCGGTAGCGGGGGCTCAACATAC |
| | | TACGCCGACTCCGTCAAGGGTCGCTTCACTATTTCCCGGGACAACTCC |
| | | AAGAATACCCTGTACCTCCAAATGAACAGCCTCAGGGCCGAGGATACT |
| | | GCCGTGTACTACTGCGCCAAAGTCGGATACGATAGCTCCGGTTACTAC |
| | | CGGGACTACTACGGAATGGACGTGTGGGGACAGGGCACCACCGTGACC |
| | | GTGTCAAGCGGCGGAGGCGGTTCAGGAGGGGGAGGCTCCGGCGGTGGA |
| | | GGGTCCGAAATCGTCCTGACTCAGTCGCCTGGCACTCTGTCGTTGTCC |
| | | CCGGGGGAGCGCGCTACCCTGTCGTGTCGGGCGTCGCAGTCCGTGTCG |
| | | AGCTCCTACCTCGCGTGGTACCAGCAGAAGCCCGGACAGGCCCCTAGA |
| | | CTTCTGATCTACGGCACTTCTTCACGCGCCACCGGGATCAGCGACAGG |
| | | TTCAGCGGCTCCGGCTCCGGGACCGACTTCACCCTGACCATTAGCCGG |
| | | CTGGAGCCTGAAGATTTCGCCGTGTATTACTGCCAACACTACGGAAAC |
| | | TCGCCGCCAAAGTTCACGTTCGGACCCGGAACCAAGCTGGAAATCAAG |
| | | ACCACTACCCCAGCACCGAGGCCACCCACCCCGGCTCCTACCATCGCC |
| | | TCCCAGCCTCTGTCCCTGCGTCCGGAGGCATGTAGACCCGCAGCTGGT |
| | | GGGGCCGTGCATACCCGGGGTCTTGACTTCGCCTGCGATATCTACATT |
| | | TGGGCCCCTCTGGCTGGTACTTGCGGGGTCCTGCTGCTTTCACTCGTG |
| | | ATCACTCTTTACTGTAAGCGCGGTCGGAAGAAGCTGCTGTACATCTTT |
| | | AAGCAACCCTTCATGAGGCCTGTGCAGACTACTCAAGAGGAGGACGGC |
| | | TGTTCATGCCGGTTCCCAGAGGAGGAGGAAGGCGGCTGCGAACTGCGC |
| | | GTGAAATTCAGCCGCAGCGCAGATGCTCCAGCCTACAAGCAGGGGCAG |
| | | AACCAGCTCTACAACGAACTCAATCTTGGTCGGAGAGAGGAGTACGAC |
| | | GTGCTGGACAAGCGGAGAGGACGGGACCCAGAAATGGGCGGGAAGCCG |
| | | CGCAGAAAGAATCCCCAAGAGGGCCTGTACAACGAGCTCCAAAAGGAT |
| | | AAGATGGCAGAAGCCTATAGCGAGATTGGTATGAAAGGGGAACGCAGA |
| | | AGAGGCAAAGGCCACGACGGACTGTACCAGGGACTCAGCACCGCCACC |
| | | AAGGACACCTATGACGCTCTTCACATGCAGGCCCTGCCGCCTCGG |

BCMA_EBB-C1978-G4

| | | |
|---|---|---|
| BCMA_EBB- | 1177 | EVQLVESGGGLVQPGGSLRLSCAASGFTFSSYAMSWVRQAPGKGLEWV |
| C1978- | | SAISGSGGSTYYADSVKGRFTISRDNSKNTLYLQMNSLRAEDTAVYYC |
| G4-aa | | AKMGWSSGYLGAFDIWGQGTTVTVSSGGGGSGGGGSGGGGSEIVLTQS |
| ScFv | | PGTLSLSPGERATLSCRASQSVASSFLAWYQQKPGQAPRLLIYGASGR |
| domain | | ATGIPDRFSGSGSGTDFTLTISRLEPEDFAVYYCQHYGGSPRLTFGGG |
| | | TKVDIK |
| BCMA_EBB- | 1178 | GAAGTCCAACTGGTGGAGTCCGGGGGAGGGCTCGTGCAGCCCGGAGGC |
| C1978- | | AGCCTTCGGCTGTCGTGCGCCGCCTCCGGGTTCACGTTCTCATCCTAC |
| G4-nt | | GCGATGTCGTGGGTCAGACAGGCACCAGGAAAGGGACTGGAATGGGTG |
| ScFv | | TCCGCCATTAGCGGCTCCGGCGGTAGCACCTACTATGCCGACTCAGTG |
| domain | | AAGGGAAGGTTCACTATCTCCCGCGACAACAGCAAGAACACCCTGTAC |
| | | CTCCAAATGAACTCTCTGCGGGCCGAGGATACCGCGGTGTACTATTGC |
| | | GCCAAGATGGGTTGGTCCAGCGGATACTTGGGAGCCTTCGACATTTGG |
| | | GGACAGGGCACTACTGTGACCGTGTCCTCCGGGGGTGGCGGATCGGGA |
| | | GGCGGCGGCTCGGGTGGAGGGGGTTCCGAAATCGTGTTGACCCAGTCA |
| | | CCGGGAACCCTCTCGCTGTCCCCGGGAGAACGGGCTACACTGTCATGT |
| | | AGAGCGTCCCAGTCCGTGGCTTCCTCGTTCCTGGCCTGGTACCAGCAG |
| | | AAGCCGGGACAGGCACCCCGCCTGCTCATCTACGGAGCCAGCGGCCGG |
| | | GCGACCGGCATCCCTGACCGCTTCTCCGGTTCCGGCTCGGGCACCGAC |
| | | TTTACTCTGACCATTAGCAGGCTTGAGCCCGAGGATTTTGCCGTGTAC |
| | | TACTGCCAACACTACGGGGGGAGCCCTCGCCTGACCTTCGGAGGCGGA |
| | | ACTAAGGTCGATATCAAAA |
| BCMA_EBB- | 1179 | EVQLVESGGGLVQPGGSLRLSCAASGFTFSSYAMSWVRQAPGKGLEWV |
| C1978- | | SAISGSGGSTYYADSVKGRFTISRDNSKNTLYLQMNSLRAEDTAVYYC |
| G4-aa | | AKMGWSSGYLGAFDIWGQGTTVTVSS |
| VH | | |
| BCMA_EBB- | 1180 | EIVLTQSPGTLSLSPGERATLSCRASQSVASSFLAWYQQKPGQAPRLL |
| C1978- | | IYGASGRATGIPDRFSGSGSGTDFTLTISRLEPEDFAVYYCQHYGGSP |
| G4-aa | | RLTFGGGTKVDIK |
| VL | | |
| BCMA_EBB- | 1181 | MALPVTALLLPLALLLHAARPEVQLVESGGGLVQPGGSLRLSCAASGF |
| C1978- | | TESSYAMSWVRQAPGKGLEWVSAISGSGGSTYYADSVKGRFTISRDNS |
| G4-aa | | KNTLYLQMNSLRAEDTAVYYCAKMGWSSGYLGAFDIWGQGTTVTVSSG |
| Full CART | | GGGSGGGGSGGGGSEIVLTQSPGTLSLSPGERATLSCRASQSVASSEL |
| | | AWYQQKPGQAPRLLIYGASGRATGIPDRFSGSGSGTDFTLTISRLEPE |
| | | DFAVYYCQHYGGSPRLTFGGGTKVDIKTTTPAPRPPTPAPTIASQPLS |
| | | LRPEACRPAAGGAVHTRGLDFACDIYIWAPLAGTCGVLLLSLVITLYC |
| | | KRGRKKLLYIFKQPFMRPVQTTQEEDGCSCRFPEEEEGGCELRVKFSR |
| | | SADAPAYKQGQNQLYNELNLGRREEYDVLDKRRGRDPEMGGKPRRKNP |
| | | QEGLYNELQKDKMAEAYSEIGMKGERRRGKGHDGLYQGLSTATKDTYD |
| | | ALHMQALPPR |
| BCMA_EBB- | 1182 | ATGGCCCTCCCTGTCACCGCCCTGCTGCTTCCGCTGGCTCTTCTGCTC |
| C1978- | | CACGCCGCTCGGCCCGAAGTCCAACTGGTGGAGTCCGGGGGAGGGCTC |
| G4-nt | | GTGCAGCCCGGAGGCAGCCTTCGGCTGTCGTGCGCCGCCTCCGGGTTC |
| Full CART | | ACGTTCTCATCCTACGCGATGTCGTGGGTCAGACAGGCACCAGGAAAG |
| | | GGACTGGAATGGGTGTCCGCCATTAGCGGCTCCGGCGGTAGCACCTAC |
| | | TATGCCGACTCAGTGAAGGGAAGGTTCACTATCTCCCGCGACAACAGC |
| | | AAGAACACCCTGTACCTCCAAATGAACTCTCTGCGGGCCGAGGATACC |
| | | GCGGTGTACTATTGCGCCAAGATGGGTTGGTCCAGCGGATACTTGGGA |
| | | GCCTTCGACATTTGGGGACAGGGCACTACTGTGACCGTGTCCTCCGGG |
| | | GGTGGCGGATCGGGAGGCGGCGGCTCGGGTGGAGGGGGTTCCGAAATC |
| | | GTGTTGACCCAGTCACCGGGAACCCTCTCGCTGTCCCCGGGAGAACGG |
| | | GCTACACTGTCATGTAGAGCGTCCCAGTCCGTGGCTTCCTCGTTCCTG |
| | | GCCTGGTACCAGCAGAAGCCGGGACAGGCACCCCGCCTGCTCATCTAC |
| | | GGAGCCAGCGGCCGGGCGACCGGCATCCCTGACCGCTTCTCCGGTTCC |
| | | GGCTCGGGCACCGACTTTACTCTGACCATTAGCAGGCTTGAGCCCGAG |
| | | GATTTTGCCGTGTACTACTGCCAACACTACGGGGGGAGCCCTCGCCTG |
| | | ACCTTCGGAGGCGGAACTAAGGTCGATATCAAAACCACTACCCCAGCA |
| | | CCGAGGCCACCCACCCCGGCTCCTACCATCGCCTCCCAGCCTCTGTCC |
| | | CTGCGTCCGGAGGCATGTAGACCCGCAGCTGGTGGGGCCGTGCATACC |
| | | CGGGGTCTTGACTTCGCCTGCGATATCTACATTTGGGCCCCTCTGGCT |
| | | GGTACTTGCGGGGTCCTGCTGCTTTCACTCGTGATCACTCTTTACTGT |
| | | AAGCGCGGTCGGAAGAAGCTGCTGTACATCTTTAAGCAACCCTTCATG |
| | | AGGCCTGTGCAGACTACTCAAGAGGAGGACGGCTGTTCATGCCGGTTC |
| | | CCAGAGGAGGAGGAAGGCGGCTGCGAACTGCGCGTGAAATTCAGCCGC |
| | | AGCGCAGATGCTCCAGCCTACAAGCAGGGGCAGAACCAGCTCTACAAC |
| | | GAACTCAATCTTGGTCGGAGAGAGGAGTACGACGTGCTGGACAAGCGG |
| | | AGAGGACGGGACCCAGAAATGGGCGGGAAGCCGCGCAGAAAGAATCCC |
| | | CAAGAGGGCCTGTACAACGAGCTCCAAAAGGATAAGATGGCAGAAGCC |
| | | TATAGCGAGATTGGTATGAAAGGGGAACGCAGAAGAGGCAAAGGCCAC |
| | | GACGGACTGTACCAGGGACTCAGCACCGCCACCAAGGACACCTATGAC |
| | | GCTCTTCACATGCAGGCCCTGCCGCCTCGG |

TABLE 8
Additional exemplary BCMA CAR sequences

| | | SEQ |
|---|---|---|
| | | ID |
| Name | Sequence | NO: |
| A7D12.2 | QIQLVQSGPDLKKPGETVKLSCKASGYTFTNFGMNWVKQAPGKGFKWMAWINTYTGESYFA | 1183 |
| VH | DDFKGRFAFSVETSATTAYLQINNLKTEDTATYFCARGEIYYGYDGGFAYWGQGTLVTVSA | |
| A7D12.2 | DVVMTQSHRFMSTSVGDRVSITCRASQDVNTAVSWYQQKPGQSPKLLIFSASYRYTGVPDR | 1184 |
| VL | FTGSGSGADFTLTISSVQAEDLAVYYCQQHYSTPWTFGGGTKLDIK | |
| A7D12.2 | QIQLVQSGPDLKKPGETVKLSCKASGYTFTNFGMNWVKQAPGKGFKWMAWINTYTGESYFA | 1185 |
| scFv | DDFKGRFAFSVETSATTAYLQINNLKTEDTATYFCARGEIYYGYDGGFAYWGQGTLVTVSA | |
| domain | GGGGSGGGGSGGGGSDVVMTQSHRFMSTSVGDRVSITCRASQDVNTAVSWYQQKPGQSPKL | |
| | LIFSASYRYTGVPDRFTGSGSGADFTLTISSVQAEDLAVYYCQQHYSTPWTFGGGTKLDIK | |
| A7D12.2 | QIQLVQSGPDLKKPGETVKLSCKASGYTFTNFGMNWVKQAPGKGFKWMAWINTYTGESYFA | 1186 |
| Full | DDFKGRFAFSVETSATTAYLQINNLKTEDTATYFCARGEIYYGYDGGFAYWGQGTLVTVSA | |
| CART | GGGGSGGGGSGGGGSDVVMTQSHRFMSTSVGDRVSITCRASQDVNTAVSWYQQKPGQSPKL | |
| | LIFSASYRYTGVPDRFTGSGSGADFTLTISSVQAEDLAVYYCQQHYSTPWTFGGGTKLDIK | |
| | TTTPAPRPPTPAPTIASQPLSLRPEACRPAAGGAVHTRGLDFACDIYIWAPLAGTCGVLLL | |
| | SLVITLYCKRGRKKLLYIFKQPFMRPVQTTQEEDGCSCRFPEEEEGGCELRVKFSRSADAP | |
| | AYKQGQNQLYNELNLGRREEYDVLDKRRGRDPEMGGKPRRKNPQEGLYNELQKDKMAEAYS | |
| | EIGMKGERRRGKGHDGLYQGLSTATKDTYDALHMQALPPR | |
| C11D5.3 | QIQLVQSGPELKKPGETVKISCKASGYTFTDYSINWVKRAPGKGLKWMGWINTETREPAYA | 1187 |
| VH | YDFRGRFAFSLETSASTAYLQINNLKYEDTATYFCALDYSYAMDYWGQGTSVTVSS | |
| C11D5.3 | DIVLTQSPASLAMSLGKRATISCRASESVSVIGAHLIHWYQQKPGQPPKLLIYLASNLETG | 1188 |
| VL | VPARFSGSGSGTDFTLTIDPVEEDDVAIYSCLQSRIFPRTFGGGTKLEIK | |
| C11D5.3 | QIQLVQSGPELKKPGETVKISCKASGYTFTDYSINWVKRAPGKGLKWMGWINTETREPAYA | 1189 |
| scFv | YDFRGRFAFSLETSASTAYLQINNLKYEDTATYFCALDYSYAMDYWGQGTSVTVSSGGGGS | |
| domain | GGGGSGGGGSQIQLVQSGPELKKPGETVKISCKASGYTFTDYSINWVKRAPGKGLKWMGWI | |
| | NTETREPAYAYDFRGRFAFSLETSASTAYLQINNLKYEDTATYFCALDYSYAMDYWGQGTS | |
| | VTVSS | |
| C11D5.3 | QIQLVQSGPELKKPGETVKISCKASGYTFTDYSINWVKRAPGKGLKWMGWINTETREPAYA | 1190 |
| Full | YDFRGRFAFSLETSASTAYLQINNLKYEDTATYFCALDYSYAMDYWGQGTSVTVSSGGGGS | |
| CART | GGGGSGGGGSQIQLVQSGPELKKPGETVKISCKASGYTFTDYSINWVKRAPGKGLKWMGWI | |
| | NTETREPAYAYDFRGRFAFSLETSASTAYLQINNLKYEDTATYFCALDYSYAMDYWGQGTS | |
| | VTVSSTTTPAPRPPTPAPTIASQPLSLRPEACRPAAGGAVHTRGLDFACDIYIWAPLAGTC | |
| | GVLLLSLVITLYCKRGRKKLLYIFKQPFMRPVQTTQEEDGCSCRFPEEEEGGCELRVKFSR | |
| | SADAPAYKQGQNQLYNELNLGRREEYDVLDKRRGRDPEMGGKPRRKNPQEGLYNELQKDKM | |
| | AEAYSEIGMKGERRRGKGHDGLYQGLSTATKDTYDALHMQALPPR | |
| C12A3.2 | QIQLVQSGPELKKPGETVKISCKASGYTFRHYSMNWVKQAPGKGLKWMGRINTESGVPIYA | 1191 |
| VH | DDFKGRFAFSVETSASTAYLVINNLKDEDTASYFCSNDYLYSLDFWGQGTALTVSS | |
| C12A3.2 | DIVLTQSPPSLAMSLGKRATISCRASESVTILGSHLIYWYQQKPGQPPTLLIQLASNVQTG | 1192 |
| VL | VPARFSGSGSRTDFTLTIDPVEEDDVAVYYCLQSRTIPRTFGGGTKLEIK | |
| C12A3.2 | QIQLVQSGPELKKPGETVKISCKASGYTFRHYSMNWVKQAPGKGLKWMGRINTESGVPIYA | 1193 |
| scFv | DDFKGRFAFSVETSASTAYLVINNLKDEDTASYFCSNDYLYSLDFWGQGTALTVSSGGGGS | |
| domain | GGGGSGGGGSDIVLTQSPPSLAMSLGKRATISCRASESVTILGSHLIYWYQQKPGQPPTLL | |
| | IQLASNVQTGVPARFSGSGSRTDFTLTIDPVEEDDVAVYYCLQSRTIPRTFGGGTKLEIK | |
| C12A3.2 | QIQLVQSGPELKKPGETVKISCKASGYTFRHYSMNWVKQAPGKGLKWMGRINTESGVPIYA | 1194 |
| Full | DDFKGRFAFSVETSASTAYLVINNLKDEDTASYFCSNDYLYSLDFWGQGTALTVSSGGGGS | |
| CART | GGGGSGGGGSDIVLTQSPPSLAMSLGKRATISCRASESVTILGSHLIYWYQQKPGQPPTLL | |
| | IQLASNVQTGVPARFSGSGSRTDFTLTIDPVEEDDVAVYYCLQSRTIPRTFGGGTKLEIKT | |
| | TTPAPRPPTPAPTIASQPLSLRPEACRPAAGGAVHTRGLDFACDIYIWAPLAGTCGVLLLS | |
| | LVITLYCKRGRKKLLYIFKQPFMRPVQTTQEEDGCSCRFPEEEEGGCELRVKFSRSADAPA | |
| | YKQGQNQLYNELNLGRREEYDVLDKRRGRDPEMGGKPRRKNPQEGLYNELQKDKMAEAYSE | |
| | IGMKGERRRGKGHDGLYQGLSTATKDTYDALHMQALPPR | |
| C13F12.1 | QIQLVQSGPELKKPGETVKISCKASGYTFTHYSMNWVKQAPGKGLKWMGRINTETGEPLYA | 1195 |
| VH | DDFKGRFAFSLETSASTAYLVINNLKNEDTATFFCSNDYLYSCDYWGQGTTLTVSS | |
| C13F12.1 | DIVLTQSPPSLAMSLGKRATISCRASESVTILGSHLIYWYQQKPGQPPTLLIQLASNVQTG | 1196 |
| VL | VPARFSGSGSRTDFTLTIDPVEEDDVAVYYCLQSRTIPRTFGGGTKLEIK | |
| C13F12.1 | QIQLVQSGPELKKPGETVKISCKASGYTFTHYSMNWVKQAPGKGLKWMGRINTETGEPLYA | 1197 |
| scFv | DDFKGRFAFSLETSASTAYLVINNLKNEDTATFFCSNDYLYSCDYWGQGTTLTVSSGGGGS | |
| domain | GGGGSGGGGSDIVLTQSPPSLAMSLGKRATISCRASESVTILGSHLIYWYQQKPGQPPTLL | |
| | IQLASNVQTGVPARFSGSGSRTDFTLTIDPVEEDDVAVYYCLQSRTIPRTFGGGTKLEIK | |
| C13F12.1 | QIQLVQSGPELKKPGETVKISCKASGYTFTHYSMNWVKQAPGKGLKWMGRINTETGEPLYA | 1198 |
| Full | DDFKGRFAFSLETSASTAYLVINNLKNEDTATFFCSNDYLYSCDYWGQGTTLTVSSGGGGS | |
| CART | GGGGSGGGGSDIVLTQSPPSLAMSLGKRATISCRASESVTILGSHLIYWYQQKPGQPPTLL | |
| | IQLASNVQTGVPARFSGSGSRTDFTLTIDPVEEDDVAVYYCLQSRTIPRTFGGGTKLEIKT | |
| | TTPAPRPPTPAPTIASQPLSLRPEACRPAAGGAVHTRGLDFACDIYIWAPLAGTCGVLLLS | |
| | LVITLYCKRGRKKLLYIFKQPFMRPVQTTQEEDGCSCRFPEEEEGGCELRVKFSRSADAPA | |
| | YKQGQNQLYNELNLGRREEYDVLDKRRGRDPEMGGKPRRKNPQEGLYNELQKDKMAEAYSE | |
| | IGMKGERRRGKGHDGLYQGLSTATKDTYDALHMQALPPR | |

[0705] Exemplary BCMA CAR constructs disclose herein comprise an scFv (e.g., a scFv as disclosed in Table 7 or 8, optionally preceded with an optional leader sequence (e.g., SEQ ID NO: 401 and SEQ ID NO: 402 for exemplary leader amino acid and nucleotide sequences, respectively). The sequences of the scFv fragments (e.g., an ScFv from any of SEQ ID NOs: 967-1182, e.g., SEQ ID NOs: 967, 973, 979, 985, 991, 997, 1003, 1009, 1015, 1021, 1027, 1033, 1039, 1045, 1051, 1057, 1063, 1069, 1075, 1081, 1087, 1093, 1099, 1105, 1111, 1117, 1123, 1129, 1135, 1141, 1147, 1153, 1159, 1165, 1171, 1177, not including the optional leader sequence) are provided herein in Tables 7 or 8. The BCMA CAR construct can further include an optional hinge domain, e.g., a CD8 hinge domain (e.g., including the amino acid sequence of SEQ ID NO: 403 or encoded by a nucleic acid sequence of SEQ ID NO: 404); a transmembrane domain, e.g., a CD8 transmembrane domain (e.g., including the amino acid sequence of SEQ ID NO: 12 or encoded by the nucleotide sequence of SEQ ID NO: 13); an intracellular domain, e.g., a 4-1BB intracellular domain (e.g., including the amino acid sequence of SEQ ID NO: 14 or encoded by the nucleotide sequence of SEQ ID NO: 15; and a functional signaling domain, e.g., a CD3 zeta domain (e.g., including amino acid sequence of SEQ ID NO: 18 or 20, or encoded by the nucleotide sequence of SEQ ID NO: 19 or 21). In certain embodiments, the domains are contiguous with and in the same reading frame to form a single fusion protein. In other embodiments, the domain are in separate polypeptides, e.g., as in an RCAR molecule as described herein.

[0706] In certain embodiments, the full length BCMA CAR molecule includes the amino acid sequence of, or is encoded by the nucleotide sequence of, BCMA-1, BCMA-2, BCMA-3, BCMA-4, BCMA-5, BCMA-6, BCMA-7, BCMA-8, BCMA-9, BCMA-10, BCMA-11, BCMA-12, BCMA-13, BCMA-14, BCMA-15, 149362, 149363, 149364, 149365, 149366, 149367, 149368, 149369, BCMA EBB-C1978-A4, BCMA EBB-C1978-G1, BCMA_EBB-C1979-C1, BCMA_EBB-C1978-C7, BCMA_EBB-C1978-D10, BCMA_EBB-C1979-C12, BCMA_EBB-C1980-G4, BCMA_EBB-C1980-D2, BCMA_EBB-C1978-A10, BCMA_EBB-C1978-D4, BCMA_EBB-C1980-A2, BCMA EBB-C1981-C3, BCMA EBB-C1978-G4, A7D12.2, C11D5.3, C12A3.2, or C13F12.1 provided in Table 7 or 8, or a sequence substantially (e.g., 85%, 95-99% or higher) identical thereto.

[0707] In certain embodiments, the BCMA CAR molecule, or the anti-BCMA antigen binding domain, includes the scFv amino acid sequence of BCMA-1, BCMA-2, BCMA-3, BCMA-4, BCMA-5, BCMA-6, BCMA-7, BCMA-8, BCMA-9, BCMA-10, BCMA-11, BCMA-12, BCMA-13, BCMA-14, BCMA-15, 149362, 149363, 149364, 149365, 149366, 149367, 149368, 149369, BCMA_EBB-C1978-A4, BCMA_EBB-C1978-G1, BCMA EBB-C1979-C1, BCMA EBB-C1978-C7, BCMA EBB-C1978-D10, BCMA EBB-C1979-C12, BCMA EBB-C1980-G4, BCMA EBB-C1980-D2, BCMA_EBB-C1978-A10, BCMA_EBB-C1978-D4, BCMA_EBB-C1980-A2, BCMA_EBB-C1981-C3, BCMA_EBB-C1978-G4, A7D12.2, C11D5.3, C12A3.2, or C13F12.1 provided in Table 7 or 8 (with or without the leader sequence), or a sequence substantially identical (e.g., 85%, 95-99% or higher identical, or up to 20, 15, 10, 8, 6, 5, 4, 3, 2, or 1 amino acid changes, e.g., substitutions (e.g., conservative substitutions)) to any of the aforesaid sequences.

[0708] In certain embodiments, the BCMA CAR molecule, or the anti-BCMA antigen binding domain, includes the heavy chain variable region and/or the light chain variable region of BCMA-1, BCMA-2, BCMA-3, BCMA-4, BCMA-5, BCMA-6, BCMA-7, BCMA-8, BCMA-9, BCMA-10, BCMA-11, BCMA-12, BCMA-13, BCMA-14, BCMA-15, 149362, 149363, 149364, 149365, 149366, 149367, 149368, 149369, BCMA_EBB-C1978-A4, BCMA_EBB-C1978-G1, BCMA_EBB-C1979-C1, BCMA_EBB-C1978-C7, BCMA_EBB-C1978-D10, BCMA_EBB-C1979-C12, BCMA_EBB-C1980-G4, BCMA_EBB-C1980-D2, BCMA_EBB-C1978-A10, BCMA_EBB-C1978-D4, BCMA_EBB-C1980-A2, BCMA_EBB-C1981-C3, BCMA_EBB-C1978-G4, A7D12.2, C11D5.3, C12A3.2, or C13F12.1 provided in Table 7 or 8, or a sequence substantially identical (e.g., 85%, 95-99% or higher identical, or up to 20, 15, 10, 8, 6, 5, 4, 3, 2, or 1 amino acid changes, e.g., substitutions (e.g., conservative substitutions)) to any of the aforesaid sequences.

[0709] In certain embodiments, the BCMA CAR molecule, or the anti-BCMA antigen binding domain, includes one, two or three CDRs from the heavy chain variable region (e.g., HCDR1, HCDR2 and/or HCDR3), provided in Table 9; and/or one, two or three CDRs from the light chain variable region (e.g., LCDR1, LCDR2 and/or LCDR3) of BCMA-1, BCMA-2, BCMA-3, BCMA-4, BCMA-5, BCMA-6, BCMA-7, BCMA-8, BCMA-9, BCMA-10, BCMA-11, BCMA-12, BCMA-13, BCMA-14, BCMA-15, 149362, 149363, 149364, 149365, 149366, 149367, 149368, 149369, BCMA_EBB-C1978-A4, BCMA_EBB-C1978-G1, BCMA_EBB-C1979-C1, BCMA_EBB-C1978-C7, BCMA_EBB-C1978-D10, BCMA_EBB-C1979-C12, BCMA_EBB-C1980-G4, BCMA_EBB-C1980-D2, BCMA_EBB-C1978-A10, BCMA_EBB-C1978-D4, BCMA_EBB-C1980-A2, BCMA_EBB-C1981-C3, BCMA_EBB-C1978-G4, A7D12.2, C11D5.3, C12A3.2, or C13F12.1, provided in Table 10; or a sequence substantially identical (e.g., 85%, 95-99% or higher identical, or up to 20, 15, 10, 8, 6, 5, 4, 3, 2, or 1 amino acid changes, e.g., substitutions (e.g., conservative substitutions)) to any of the aforesaid sequences.

[0710] In certain embodiments, the BCMA CAR molecule, or the anti-BCMA antigen binding domain, includes one, two or three CDRs from the heavy chain variable region (e.g., HCDR1, HCDR2 and/or HCDR3), provided in Table 11; and/or one, two or three CDRs from the light chain variable region (e.g., LCDR1, LCDR2 and/or LCDR3) of BCMA-1, BCMA-2, BCMA-3, BCMA-4, BCMA-5, BCMA-6, BCMA-7, BCMA-8, BCMA-9, BCMA-10, BCMA-11, BCMA-12, BCMA-13, BCMA-14, BCMA-15, 149362, 149363, 149364, 149365, 149366, 149367, 149368, 149369, BCMA_EBB-C1978-A4, BCMA_EBB-C1978-G1, BCMA_EBB-C1979-C1, BCMA_EBB-C1978-C7, BCMA_EBB-C1978-D10, BCMA_EBB-C1979-C12, BCMA_EBB-C1980-G4, BCMA_EBB-C1980-D2, BCMA_EBB-C1978-A10, BCMA_EBB-C1978-D4, BCMA_EBB-C1980-A2, BCMA_EBB-C1981-C3, BCMA_EBB-C1978-G4, A7D12.2, C11D5.3, C12A3.2, or C13F12.1, provided in Table 12; or a sequence substantially identical (e.g., 85%, 95-99% or higher identical, or up to 20, 15, 10, 8, 6, 5, 4, 3, 2, or 1 amino acid changes, e.g., substitutions (e.g., conservative substitutions)) to any of the aforesaid sequences.

[0711] In certain embodiments, the BCMA CAR molecule, or the anti-BCMA antigen binding domain, includes one, two or three CDRs from the heavy chain variable region (e.g., HCDR1, HCDR2 and/or HCDR3), provided in Table 13; and/or one, two or three CDRs from the light chain variable region (e.g., LCDR1, LCDR2 and/or LCDR3) of BCMA-1, BCMA-2, BCMA-3, BCMA-4, BCMA-5, BCMA-6, BCMA-7, BCMA-8, BCMA-9, BCMA-10, BCMA-11, BCMA-12, BCMA-13, BCMA-14, BCMA-15, 149362, 149363, 149364, 149365, 149366, 149367, 149368, 149369, BCMA_EBB-C1978-A4, BCMA_EBB-C1978-G1, BCMA_EBB-C1979-C1, BCMA_EBB-C1978-C7, BCMA_EBB-C1978-D10, BCMA_EBB-C1979-C12, BCMA_EBB-C1980-G4, BCMA_EBB-C1980-D2, BCMA_EBB-C1978-A10, BCMA_EBB-C1978-D4, BCMA_EBB-C1980-A2, BCMA_EBB-C1981-C3, BCMA_EBB-C1978-G4, A7D12.2, C11D5.3, C12A3.2, or C13F12.1, provided in Table 14; or a sequence substantially identical (e.g., 85%, 95-99% or higher identical, or up to 20, 15, 10, 8, 6, 5, 4, 3, 2, or 1 amino acid changes, e.g., substitutions (e.g., conservative substitutions)) to any of the aforesaid sequences.

[0712] The sequences of human CDR sequences of the scFv domains are shown in Tables 9, 11, and 13 for the heavy chain variable domains and in Tables 10, 12, and 14 for the light chain variable domains.

TABLE 9
Heavy Chain Variable Domain CDRs according to the Kabat numbering scheme
(Kabat et al. (1991), “Sequences of Proteins of Immunological Interest,”
5th Ed. Public Health Service, National Institutes of Health, Bethesda, MD)

| | | SEQ | | SEQ | | SEQ |
|---|---|---|---|---|---|---|
| | | ID | | ID | | ID |
| Candidate | HCDR1 | NO: | HCDR2 | NO: | HCDR3 | NO: |
| 139109 | NHGMS | 1199 | GIVYSGSTYYA | 1239 | HGGESDV | 1279 |
| | | | ASVKG | | | |
| 139103 | NYAMS | 1200 | GISRSGENTYY | 1240 | SPAHYYGGMDV | 1280 |
| | | | ADSVKG | | | |
| 139105 | DYAMH | 1201 | GISWNSGSIGY | 1241 | HSFLAY | 1281 |
| | | | ADSVKG | | | |
| 139111 | NHGMS | 1202 | GIVYSGSTYYA | 1242 | HGGESDV | 1282 |
| | | | ASVKG | | | |
| 139100 | NFGIN | 1203 | WINPKNNNTNY | 1243 | GPYYYQSYMDV | 1283 |
| | | | AQKFQG | | | |
| 139101 | SDAMT | 1204 | VISGSGGTTYY | 1244 | LDSSGYYYARGPR | 1284 |
| | | | ADSVKG | | Y | |
| 139102 | NYGIT | 1205 | WISAYNGNTNY | 1245 | GPYYYYMDV | 1285 |
| | | | AQKFQG | | | |
| 139104 | NHGMS | 1206 | GIVYSGSTYYA | 1246 | HGGESDV | 1286 |
| | | | ASVKG | | | |
| 139106 | NHGMS | 1207 | GIVYSGSTYYA | 1247 | HGGESDV | 1287 |
| | | | ASVKG | | | |
| 139107 | NHGMS | 1208 | GIVYSGSTYYA | 1248 | HGGESDV | 1288 |
| | | | ASVKG | | | |
| 139108 | DYYMS | 1209 | YISSSGSTIYY | 1249 | ESGDGMDV | 1289 |
| | | | ADSVKG | | | |
| 139110 | DYYMS | 1210 | YISSSGNTIYY | 1250 | STMVREDY | 1290 |
| | | | ADSVKG | | | |
| 139112 | NHGMS | 1211 | GIVYSGSTYYA | 1251 | HGGESDV | 1291 |
| | | | ASVKG | | | |
| 139113 | NHGMS | 1212 | GIVYSGSTYYA | 1252 | HGGESDV | 1292 |
| | | | ASVKG | | | |
| 139114 | NHGMS | 1213 | GIVYSGSTYYA | 1253 | HGGESDV | 1293 |
| | | | ASVKG | | | |
| 149362 | SSYYY | 1214 | SIYYSGSAYYN | 1254 | HWQEWPDAFDI | 1294 |
| | WG | | PSLKS | | | |
| 149363 | TSGMC | 1215 | RIDWDEDKFYS | 1255 | SGAGGTSATAFDI | 1295 |
| | VS | | TSLKT | | | |
| 149364 | SYSMN | 1216 | SISSSSSYIYY | 1256 | TIAAVYAFDI | 1296 |
| | | | ADSVKG | | | |
| 149365 | DYYMS | 1217 | YISSSGSTIYY | 1257 | DLRGAFDI | 1297 |
| | | | ADSVKG | | | |
| 149366 | SHYIH | 1218 | MINPSGGVTAY | 1258 | EGSGSGWYFDF | 1298 |
| | | | SQTLQG | | | |
| 149367 | SGGYY | 1219 | YIYYSGSTYYN | 1259 | AGIAARLRGAFDI | 1299 |
| | WS | | PSLKS | | | |
| 149368 | SYAIS | 1220 | GIIPIFGTANY | 1260 | RGGYQLLRWDVG | 1300 |
| | | | AQKFQG | | LLRSAFDI | |
| 149369 | SNSAA | 1221 | RTYYRSKWYSF | 1261 | SSPEGLFLYWFD | 1301 |
| | WN | | YAISLKS | | P | |
| BCMA_EBB- | SYAMS | 1222 | AISGSGGSTYY | 1262 | VEGSGSLDY | 1302 |
| C1978-A4 | | | ADSVKG | | | |
| BCMA_EBB- | RYPMS | 1223 | GISDSGVSTYY | 1263 | RAGSEASDI | 1303 |
| C1978-G1 | | | ADSAKG | | | |
| BCMA_EBB- | SYAMS | 1224 | AISGSGGSTYY | 1264 | ATYKRELRYYYG | 1304 |
| C1979-C1 | | | ADSVKG | | MDV | |
| BCMA_EBB- | SYAMS | 1225 | AISGSGGSTYY | 1265 | ATYKRELRYYYG | 1305 |
| C1978-C7 | | | ADSVKG | | MDV | |
| BCMA_EBB- | DYAMH | 1226 | GISWNSGSIGY | 1266 | VGKAVPDV | 1306 |
| C1978-D10 | | | ADSVKG | | | |
| BCMA_EBB- | DYAMH | 1227 | SINWKGNSLAY | 1267 | HQGVAYYNYAM | 1307 |
| C1979-C12 | | | GDSVKG | | DV | |
| BCMA_EBB- | SYAMS | 1228 | AISGSGGSTYY | 1268 | VVRDGMDV | 1308 |
| C1980-G4 | | | ADSVKG | | | |
| BCMA_EBB- | SYAMS | 1229 | AISGSGGSTYY | 1269 | IPQTGTFDY | 1309 |
| C1980-D2 | | | ADSVKG | | | |
| BCMA_EBB- | SYAMS | 1230 | AISGSGGSTYY | 1270 | ANYKRELRYYYG | 1310 |
| C1978-A10 | | | ADSVKG | | MDV | |
| BCMA_EBB- | SYAMS | 1231 | AISGSGGSTYY | 1271 | ALVGATGAFDI | 1311 |
| C1978-D4 | | | ADSVKG | | | |
| BCMA_EBB- | SYAMS | 1232 | AISGSGGSTYY | 1272 | WFGEGFDP | 1312 |
| C1980-A2 | | | ADSVKG | | | |
| BCMA_EBB- | SYAMS | 1233 | AISGSGGSTYY | 1273 | VGYDSSGYYRDY | 1313 |
| C1981-C3 | | | ADSVKG | | YGMDV | |
| BCMA_EBB- | SYAMS | 1234 | AISGSGGSTYY | 1274 | MGWSSGYLGAFD | 1314 |
| C1978-G4 | | | ADSVKG | | I | |
| A7D12.2 | NFGMN | 1235 | WINTYTGESYF | 1275 | GEIYYGYDGGFA | 1315 |
| | | | ADDFKG | | Y | |
| C11D5.3 | DYSIN | 1236 | WINTETREPAY | 1276 | DYSYAMDY | 1316 |
| | | | AYDFRG | | | |
| C12A3.2 | HYSMN | 1237 | RINTESGVPIY | 1277 | DYLYSLDF | 1317 |
| | | | ADDFKG | | | |
| C13F12.1 | HYSMN | 1238 | RINTETGEPLY | 1278 | DYLYSCDY | 1318 |
| | | | ADDFKG | | | |

TABLE 10
Light Chain Variable Domain CDRs according to the Kabat numbering scheme
(Kabat et al. (1991), “Sequences of Proteins of Immunological Interest,”
5th Ed. Public Health Service, National Institutes of Health, Bethesda, MD)

| | | SEQ | | SEQ | | SEQ |
|---|---|---|---|---|---|---|
| | | ID | | ID | | ID |
| Candidate | LCDR1 | NO: | LCDR2 | NO: | LCDR3 | NO: |
| 139109 | RASQSISSYLN | 1319 | AASSLQS | 1359 | QQSYSTPYT | 1399 |
| 139103 | RASQSISSSFLA | 1320 | GASRRAT | 1360 | QQYHSSPSWT | 1400 |
| 139105 | RSSQSLLHSNGYNYLD | 1321 | LGSNRAS | 1361 | MQALQTPYT | 1401 |
| 139111 | KSSQSLLRNDGKTPLY | 1322 | EVSNRFS | 1362 | MQNIQFPS | 1402 |
| 139100 | RSSQSLLHSNGYNYLN | 1323 | LGSKRAS | 1363 | MQALQTPYT | 1403 |
| 139101 | RASQSISSYLN | 1324 | GASTLAS | 1364 | QQSYKRAS | 1404 |
| 139102 | RSSQSLLYSNGYNYVD | 1325 | LGSNRAS | 1365 | MQGRQFPYS | 1405 |
| 139104 | RASQSVSSNLA | 1326 | GASTRAS | 1366 | QQYGSSLT | 1406 |
| 139106 | RASQSVSSKLA | 1327 | GASIRAT | 1367 | QQYGSSSWT | 1407 |
| 139107 | RASQSVGSTNLA | 1328 | DASNRAT | 1368 | QQYGSSPPWT | 1408 |
| 139108 | RASQSISSYLN | 1329 | AASSLQS | 1369 | QQSYTLA | 1409 |
| 139110 | KSSESLVHNSGKTYLN | 1330 | EVSNRDS | 1370 | MQGTHWPGT | 1410 |
| 139112 | QASEDINKFLN | 1331 | DASTLQT | 1371 | QQYESLPLT | 1411 |
| 139113 | RASQSVGSNLA | 1332 | GASTRAT | 1372 | QQYNDWLPVT | 1412 |
| 139114 | RASQSIGSSSLA | 1333 | GASSRAS | 1373 | QQYAGSPPFT | 1413 |
| 149362 | KASQDIDDAMN | 1334 | SATSPVP | 1374 | LQHDNFPLT | 1414 |
| 149363 | RASQDIYNNLA | 1335 | AANKSQS | 1375 | QHYYRFPYS | 1415 |
| 149364 | RSSQSLLHSNGYNYLD | 1336 | LGSNRAS | 1376 | MQALQTPYT | 1416 |
| 149365 | GGNNIGTKSVH | 1337 | DDSVRPS | 1377 | QVWDSDSEHVV | 1417 |
| 149366 | SGDGLSKKYVS | 1338 | RDKERPS | 1378 | QAWDDTTVV | 1418 |
| 149367 | RASQGIRNWLA | 1339 | AASNLQS | 1379 | QKYNSAPFT | 1419 |
| 149368 | GGNNIGSKSVH | 1340 | GKNNRPS | 1380 | SSRDSSGDHLRV | 1420 |
| 149369 | QGDSLGNYYAT | 1341 | GTNNRPS | 1381 | NSRDSSGHHLL | 1421 |
| BCMA_EBB- | RASQSVSSAYLA | 1342 | GASTRAT | 1382 | QHYGSSFNGSS | 1422 |
| C1978-A4 | | | | | LFT | |
| BCMA_EBB- | RASQSVSNSLA | 1343 | DASSRAT | 1383 | QQFGTSSGLT | 1423 |
| C1978-G1 | | | | | | |
| BCMA_EBB- | RASQSVSSSFLA | 1344 | GASSRAT | 1384 | QQYHSSPSWT | 1424 |
| C1979-C1 | | | | | | |
| BCMA_EBB- | RASQSVSTTFLA | 1345 | GSSNRAT | 1385 | QQYHSSPSWT | 1425 |
| C1978-C7 | | | | | | |
| BCMA_EBB- | RASQSISSYLN | 1346 | AASSLQS | 1386 | QQSYSTPYS | 1426 |
| C1978-D10 | | | | | | |
| BCMA_EBB- | RATQSIGSSFLA | 1347 | GASQRAT | 1387 | QHYESSPSWT | 1427 |
| C1979-C12 | | | | | | |
| BCMA_EBB- | RASQSVSSSYLA | 1348 | GASSRAT | 1388 | QQYGSPPRFT | 1428 |
| C1980-G4 | | | | | | |
| BCMA_EBB- | RASQSVSSSYLA | 1349 | GASSRAT | 1389 | QHYGSSPSWT | 1429 |
| C1980-D2 | | | | | | |
| BCMA_EBB- | RASQRVASNYLA | 1350 | GASSRAT | 1390 | QHYDSSPSWT | 1430 |
| C1978-A10 | | | | | | |
| BCMA_EBB- | RASQSLSSNFLA | 1351 | GASNWAT | 1391 | QYYGTSPMYT | 1431 |
| C1978-D4 | | | | | | |
| BCMA_EBB- | RSSQSLLHSNGYNYLD | 1352 | LGSNRAS | 1392 | MQALQTPLT | 1432 |
| C1980-A2 | | | | | | |
| BCMA_EBB- | RASQSVSSSYLA | 1353 | GTSSRAT | 1393 | QHYGNSPPKFT | 1433 |
| C1981-C3 | | | | | | |
| BCMA_EBB- | RASQSVASSFLA | 1354 | GASGRAT | 1394 | QHYGGSPRLT | 1434 |
| C1978-G4 | | | | | | |
| A7D12.2 | RASQDVNTAVS | 1355 | SASYRYT | 1395 | QQHYSTPWT | 1435 |
| C11D5.3 | RASESVSVIGAHLIH | 1356 | LASNLET | 1396 | LQSRIFPRT | 1436 |
| C12A3.2 | RASESVTILGSHLIY | 1357 | LASNVQT | 1397 | LQSRTIPRT | 1437 |
| C13F12.1 | RASESVTILGSHLIY | 1358 | LASNVQT | 1398 | LQSRTIPRT | 1438 |

TABLE 11
Heavy Chain Variable Domain CDRs according
to the Chothia numbering scheme
(Al-Lazikani et al., (1997) JMB 273,927-948)

| | | SEQ | | SEQ | | SEQ |
|---|---|---|---|---|---|---|
| | | ID | | ID | | ID |
| Candidate | HCDR1 | NO: | HCDR2 | NO: | HCDR3 | NO: |
| 139109 | GFALSNH | 1439 | VYSGS | 1479 | HGGESDV | 1519 |
| 139103 | GFTFSNY | 1440 | SRSGEN | 1480 | SPAHYYGGMDV | 1520 |
| 139105 | GFTFDDY | 1441 | SWNSGS | 1481 | HSFLAY | 1521 |
| 139111 | GFALSNH | 1442 | VYSGS | 1482 | HGGESDV | 1522 |
| 139100 | GYIFDNF | 1443 | NPKNNN | 1483 | GPYYYQSYMDV | 1523 |
| 139101 | GFTFSSD | 1444 | SGSGGT | 1484 | LDSSGYYYARGPRY | 1524 |
| 139102 | GYTFSNY | 1445 | SAYNGN | 1485 | GPYYYYMDV | 1525 |
| 139104 | GFALSNH | 1446 | VYSGS | 1486 | HGGESDV | 1526 |
| 139106 | GFALSNH | 1447 | VYSGS | 1487 | HGGESDV | 1527 |
| 139107 | GFALSNH | 1448 | VYSGS | 1488 | HGGESDV | 1528 |
| 139108 | GFTFSDY | 1449 | SSSGST | 1489 | ESGDGMDV | 1529 |
| 139110 | GFTFSDY | 1450 | SSSGNT | 1490 | STMVREDY | 1530 |
| 139112 | GFALSNH | 1451 | VYSGS | 1491 | HGGESDV | 1531 |
| 139113 | GFALSNH | 1452 | VYSGS | 1492 | HGGESDV | 1532 |
| 139114 | GFALSNH | 1453 | VYSGS | 1493 | HGGESDV | 1533 |
| 149362 | GGSISSSYY | 1454 | YYSGS | 1494 | HWQEWPDAFDI | 1534 |
| 149363 | GFSLRTSGM | 1455 | DWDED | 1495 | SGAGGTSATAFDI | 1535 |
| 149364 | GFTFSSY | 1456 | SSSSSY | 1496 | TIAAVYAFDI | 1536 |
| 149365 | GFTFSDY | 1457 | SSSGST | 1497 | DLRGAFDI | 1537 |
| 149366 | GYTVTSH | 1458 | NPSGGV | 1498 | EGSGSGWYFDF | 1538 |
| 149367 | GGSISSGGY | 1459 | YYSGS | 1499 | AGIAARLRGAFDI | 1539 |
| 149368 | GGTFSSY | 1460 | IPIFGT | 1500 | RGGYQLLRWDVGLL | 1540 |
| | | | | | RSAFDI | |
| 149369 | GDSVSSNSA | 1461 | YYRSKWY | 1501 | SSPEGLFLYWFDP | 1541 |
| BCMA_EBB- | GFTFSSY | 1462 | SGSGGS | 1502 | VEGSGSLDY | 1542 |
| C1978-A4 | | | | | | |
| BCMA_EBB- | GITFSRY | 1463 | SDSGVS | 1503 | RAGSEASDI | 1543 |
| C1978-G1 | | | | | | |
| BCMA_EBB- | GFTFSSY | 1464 | SGSGGS | 1504 | ATYKRELRYYYGMD | 1544 |
| C1979-C1 | | | | | V | |
| BCMA_EBB- | GFTFSSY | 1465 | SGSGGS | 1505 | ATYKRELRYYYGMD | 1545 |
| C1978-C7 | | | | | V | |
| BCMA_EBB- | GFTFDDY | 1466 | SWNSGS | 1506 | VGKAVPDV | 1546 |
| C1978-D10 | | | | | | |
| BCMA_EBB- | GFTFDDY | 1467 | NWKGNS | 1507 | HQGVAYYNYAMDV | 1547 |
| C1979-C12 | | | | | | |
| BCMA_EBB- | GFTFSSY | 1468 | SGSGGS | 1508 | VVRDGMDV | 1548 |
| C1980-G4 | | | | | | |
| BCMA_EBB- | GFTFSSY | 1469 | SGSGGS | 1509 | IPQTGTFDY | 1549 |
| C1980-D2 | | | | | | |
| BCMA_EBB- | GFTFSSY | 1470 | SGSGGS | 1510 | ANYKRELRYYYGMD | 1550 |
| C1978-A10 | | | | | V | |
| BCMA_EBB- | GFSFSSY | 1471 | SGSGGS | 1511 | ALVGATGAFDI | 1551 |
| C1978-D4 | | | | | | |
| BCMA_EBB- | GFTFSSY | 1472 | SGSGGS | 1512 | WFGEGFDP | 1552 |
| C1980-A2 | | | | | | |
| BCMA_EBB- | GFTFSSY | 1473 | SGSGGS | 1513 | VGYDSSGYYRDYYG | 1553 |
| C1981-C3 | | | | | MDV | |
| BCMA_EBB- | GFTFSSY | 1474 | SGSGGS | 1514 | MGWSSGYLGAFDI | 1554 |
| C1978-G4 | | | | | | |
| A7D12.2 | GYTFTNF | 1475 | NTYTGE | 1515 | GEIYYGYDGGFAY | 1555 |
| C11D5.3 | GYTFTDY | 1476 | NTETRE | 1516 | DYSYAMDY | 1556 |
| C12A3.2 | GYTFRHY | 1477 | NTESGV | 1517 | DYLYSLDF | 1557 |
| C13F12.1 | GYTFTHY | 1478 | NTETGE | 1518 | DYLYSCDY | 1558 |

TABLE 12
Light Chain Variable Domain CDRs according
to the Chothia numbering scheme
(Al-Lazikani et al., (1997) JMB 273,927-948)

| | | SEQ | | SEQ | | SEQ |
|---|---|---|---|---|---|---|
| | | ID | | ID | | ID |
| Candidate | LCDR1 | NO: | LCDR2 | NO: | LCDR3 | NO: |
| 139109 | SQSISSY | 1559 | AAS | 1599 | SYSTPY | 1639 |
| 139103 | SQSISSSF | 1560 | GAS | 1600 | YHSSPSW | 1640 |
| 139105 | SQSLLHSNGYNY | 1561 | LGS | 1601 | ALQTPY | 1641 |
| 139111 | SQSLLRNDGKTP | 1562 | EVS | 1602 | NIQFP | 1642 |
| 139100 | SQSLLHSNGYNY | 1563 | LGS | 1603 | ALQTPY | 1643 |
| 139101 | SQSISSY | 1564 | GAS | 1604 | SYKRA | 1644 |
| 139102 | SQSLLYSNGYNY | 1565 | LGS | 1605 | GRQFPY | 1645 |
| 139104 | SQSVSSN | 1566 | GAS | 1606 | YGSSL | 1646 |
| 139106 | SQSVSSK | 1567 | GAS | 1607 | YGSSSW | 1647 |
| 139107 | SQSVGSTN | 1568 | DAS | 1608 | YGSSPPW | 1648 |
| 139108 | SQSISSY | 1569 | AAS | 1609 | SYTL | 1649 |
| 139110 | SESLVHNSGKTY | 1570 | EVS | 1610 | GTHWPG | 1650 |
| 139112 | SEDINKF | 1571 | DAS | 1611 | YESLPL | 1651 |
| 139113 | SQSVGSN | 1572 | GAS | 1612 | YNDWLPV | 1652 |
| 139114 | SQSIGSSS | 1573 | GAS | 1613 | YAGSPPF | 1653 |
| 149362 | SQDIDDA | 1574 | SAT | 1614 | HDNFPL | 1654 |
| 149363 | SQDIYNN | 1575 | AAN | 1615 | YYRFPY | 1655 |
| 149364 | SQSLLHSNGYNY | 1576 | LGS | 1616 | ALQTPY | 1656 |
| 149365 | NNIGTKS | 1577 | DDS | 1617 | WDSDSEHV | 1657 |
| 149366 | DGLSKKY | 1578 | RDK | 1618 | WDDTTV | 1658 |
| 149367 | SQGIRNW | 1579 | AAS | 1619 | YNSAPF | 1659 |
| 149368 | NNIGSKS | 1580 | GKN | 1620 | RDSSGDHLR | 1660 |
| 149369 | DSLGNYY | 1581 | GTN | 1621 | RDSSGHHL | 1661 |
| BCMA_EBB- | SQSVSSAY | 1582 | GAS | 1622 | YGSSFNGSSLF | 1662 |
| C1978-A4 | | | | | | |
| BCMA_EBB- | SQSVSNS | 1583 | DAS | 1623 | FGTSSGL | 1663 |
| C1978-G1 | | | | | | |
| BCMA_EBB- | SQSVSSSF | 1584 | GAS | 1624 | YHSSPSW | 1664 |
| C1979-C1 | | | | | | |
| BCMA_EBB- | SQSVSTTF | 1585 | GSS | 1625 | YHSSPSW | 1665 |
| C1978-C7 | | | | | | |
| BCMA_EBB- | SQSISSY | 1586 | AAS | 1626 | SYSTPY | 1666 |
| C1978-D10 | | | | | | |
| BCMA_EBB- | TQSIGSSF | 1587 | GAS | 1627 | YESSPSW | 1667 |
| C1979-C12 | | | | | | |
| BCMA_EBB- | SQSVSSSY | 1588 | GAS | 1628 | YGSPPRF | 1668 |
| C1980-G4 | | | | | | |
| BCMA_EBB- | SQSVSSSY | 1589 | GAS | 1629 | YGSSPSW | 1669 |
| C1980-D2 | | | | | | |
| BCMA_EBB- | SQRVASNY | 1590 | GAS | 1630 | YDSSPSW | 1670 |
| C1978-A10 | | | | | | |
| BCMA_EBB- | SQSLSSNF | 1591 | GAS | 1631 | YGTSPMY | 1671 |
| C1978-D4 | | | | | | |
| BCMA_EBB- | SQSLLHSNGYNY | 1592 | LGS | 1632 | ALQTPL | 1672 |
| C1980-A2 | | | | | | |
| BCMA_EBB- | SQSVSSSY | 1593 | GTS | 1633 | YGNSPPKF | 1673 |
| C1981-C3 | | | | | | |
| BCMA_EBB- | SQSVASSF | 1594 | GAS | 1634 | YGGSPRL | 1674 |
| C1978-G4 | | | | | | |
| A7D12.2 | SQDVNTA | 1595 | SAS | 1635 | HYSTPW | 1675 |
| C11D5.3 | SESVSVIGAHL | 1596 | LAS | 1636 | SRIFPR | 1676 |
| C12A3.2 | SESVTILGSHL | 1597 | LAS | 1637 | SRTIPR | 1677 |
| C13F12.1 | SESVTILGSHL | 1598 | LAS | 1638 | SRTIPR | 1678 |

TABLE 13
Heavy Chain Variable Domain CDRs according to a combination of the
Kabat numbering scheme (Kabat et al. (1991), “Sequences of Proteins
of Immunological Interest,” 5th Ed. Public Health Service,
National Institutes of Health, Bethesda, MD) and the Chothia
numbering scheme (Al-Lazikani et al., (1997) JMB 273,927-948).

| | | SEQ | | SEQ | | SEQ |
|---|---|---|---|---|---|---|
| | | ID | | ID | | ID |
| Candidate | HCDR1 | NO: | HCDR2 | NO: | HCDR3 | NO: |
| 139109 | GFALSNHGMS | 1679 | GIVYSGSTYYAAS | 1719 | HGGESDV | 1759 |
| | | | VKG | | | |
| 139103 | GFTFSNYAMS | 1680 | GISRSGENTYYAD | 1720 | SPAHYYGGMD | 1760 |
| | | | SVKG | | V | |
| 139105 | GFTFDDYAMH | 1681 | GISWNSGSIGYAD | 1721 | HSFLAY | 1761 |
| | | | SVKG | | | |
| 139111 | GFALSNHGMS | 1682 | GIVYSGSTYYAAS | 1722 | HGGESDV | 1762 |
| | | | VKG | | | |
| 139100 | GYIFDNFGIN | 1683 | WINPKNNNTNYA | 1723 | GPYYYQSYMD | 1763 |
| | | | QKFQG | | V | |
| 139101 | GFTFSSDAMT | 1684 | VISGSGGTTYYAD | 1724 | LDSSGYYYAR | 1764 |
| | | | SVKG | | GPRY | |
| 139102 | GYTFSNYGIT | 1685 | WISAYNGNTNYA | 1725 | GPYYYYMDV | 1765 |
| | | | QKFQG | | | |
| 139104 | GFALSNHGMS | 1686 | GIVYSGSTYYAAS | 1726 | HGGESDV | 1766 |
| | | | VKG | | | |
| 139106 | GFALSNHGMS | 1687 | GIVYSGSTYYAAS | 1727 | HGGESDV | 1767 |
| | | | VKG | | | |
| 139107 | GFALSNHGMS | 1688 | GIVYSGSTYYAAS | 1728 | HGGESDV | 1768 |
| | | | VKG | | | |
| 139108 | GFTFSDYYMS | 1689 | YISSSGSTIYYADS | 1729 | ESGDGMDV | 1769 |
| | | | VKG | | | |
| 139110 | GFTFSDYYMS | 1690 | YISSSGNTIYYAD | 1730 | STMVREDY | 1770 |
| | | | SVKG | | | |
| 139112 | GFALSNHGMS | 1691 | GIVYSGSTYYAAS | 1731 | HGGESDV | 1771 |
| | | | VKG | | | |
| 139113 | GFALSNHGMS | 1692 | GIVYSGSTYYAAS | 1732 | HGGESDV | 1772 |
| | | | VKG | | | |
| 139114 | GFALSNHGMS | 1693 | GIVYSGSTYYAAS | 1733 | HGGESDV | 1773 |
| | | | VKG | | | |
| 149362 | GGSISSSYYYW | 1694 | SIYYSGSAYYNPS | 1734 | HWQEWPDAFD | 1774 |
| | G | | LKS | | I | |
| 149363 | GFSLRTSGMC | 1695 | RIDWDEDKFYSTS | 1735 | SGAGGTSATAF | 1775 |
| | VS | | LKT | | DI | |
| 149364 | GFTFSSYSMN | 1696 | SISSSSSYIYYADS | 1736 | TIAAVYAFDI | 1776 |
| | | | VKG | | | |
| 149365 | GFTFSDYYMS | 1697 | YISSSGSTIYYADS | 1737 | DLRGAFDI | 1777 |
| | | | VKG | | | |
| 149366 | GYTVTSHYIH | 1698 | MINPSGGVTAYS | 1738 | EGSGSGWYFD | 1778 |
| | | | QTLQG | | F | |
| 149367 | GGSISSGGYY | 1699 | YIYYSGSTYYNPS | 1739 | AGIAARLRGAF | 1779 |
| | WS | | LKS | | DI | |
| 149368 | GGTFSSYAIS | 1700 | GIIPIFGTANYAQ | 1740 | RGGYQLLRWD | 1780 |
| | | | KFQG | | VGLLRSAFDI | |
| 149369 | GDSVSSNSAA | 1701 | RTYYRSKWYSFY | 1741 | SSPEGLFLYWF | 1781 |
| | WN | | AISLKS | | DP | |
| BCMA_EBB- | GFTFSSYAMS | 1702 | AISGSGGSTYYAD | 1742 | VEGSGSLDY | 1782 |
| C1978-A4 | | | SVKG | | | |
| BCMA_EBB- | GITFSRYPMS | 1703 | GISDSGVSTYYAD | 1743 | RAGSEASDI | 1783 |
| C1978-G1 | | | SAKG | | | |
| BCMA_EBB- | GFTFSSYAMS | 1704 | AISGSGGSTYYAD | 1744 | ATYKRELRYY | 1784 |
| C1979-C1 | | | SVKG | | YGMDV | |
| BCMA_EBB- | GFTFSSYAMS | 1705 | AISGSGGSTYYAD | 1745 | ATYKRELRYY | 1785 |
| C1978-C7 | | | SVKG | | YGMDV | |
| BCMA_EBB- | GFTFDDYAMH | 1706 | GISWNSGSIGYAD | 1746 | VGKAVPDV | 1786 |
| C1978-D10 | | | SVKG | | | |
| BCMA_EBB- | GFTFDDYAMH | 1707 | SINWKGNSLAYG | 1747 | HQGVAYYNYA | 1787 |
| C1979-C12 | | | DSVKG | | MDV | |
| BCMA_EBB- | GFTFSSYAMS | 1708 | AISGSGGSTYYAD | 1748 | VVRDGMDV | 1788 |
| C1980-G4 | | | SVKG | | | |
| BCMA_EBB- | GFTFSSYAMS | 1709 | AISGSGGSTYYAD | 1749 | IPQTGTFDY | 1789 |
| C1980-D2 | | | SVKG | | | |
| BCMA_EBB- | GFTFSSYAMS | 1710 | AISGSGGSTYYAD | 1750 | ANYKRELRYY | 1790 |
| C1978-A10 | | | SVKG | | YGMDV | |
| BCMA_EBB- | GFSFSSYAMS | 1711 | AISGSGGSTYYAD | 1751 | ALVGATGAFDI | 1791 |
| C1978-D4 | | | SVKG | | | |
| BCMA_EBB- | GFTFSSYAMS | 1712 | AISGSGGSTYYAD | 1752 | WFGEGFDP | 1792 |
| C1980-A2 | | | SVKG | | | |
| BCMA_EBB- | GFTFSSYAMS | 1713 | AISGSGGSTYYAD | 1753 | VGYDSSGYYR | 1793 |
| C1981-C3 | | | SVKG | | DYYGMDV | |
| BCMA_EBB- | GFTFSSYAMS | 1714 | AISGSGGSTYYAD | 1754 | MGWSSGYLGA | 1794 |
| C1978-G4 | | | SVKG | | FDI | |
| A7D12.2 | GYTFTNFGMN | 1715 | WINTYTGESYFA | 1755 | GEIYYGYDGGF | 1795 |
| | | | DDFKG | | AY | |
| C11D5.3 | GYTFTDYSIN | 1716 | WINTETREPAYA | 1756 | DYSYAMDY | 1796 |
| | | | YDFRG | | | |
| C12A3.2 | GYTFRHYSMN | 1717 | RINTESGVPIYAD | 1757 | DYLYSLDF | 1797 |
| | | | DFKG | | | |
| C13F12.1 | GYTFTHYSMN | 1718 | RINTETGEPLYAD | 1758 | DYLYSCDY | 1798 |
| | | | DFKG | | | |

TABLE 14
Light Chain Variable Domain CDRs according to a combination of the
Kabat numbering scheme (Kabat et al. (1991), ″Sequences of Proteins
of Immunological Interest,″ 5th Ed. Public Health Service, National
Institutes of Health, Bethesda, MD) and the Chothia
numbering scheme (Al-Lazikani et al., (1997) JMB 273,927-948).

| | | SEQ | | SEQ | | SEQ |
|---|---|---|---|---|---|---|
| | | ID | | ID | | ID |
| Candidate | LCDR1 | NO: | LCDR2 | NO: | LCDR3 | NO: |
| 139109 | RASQSISSYLN | 1799 | AASSLQS | 1839 | QQSYSTPYT | 1879 |
| 139103 | RASQSISSSFLA | 1800 | GASRRAT | 1840 | QQYHSSPSWT | 1880 |
| 139105 | RSSQSLLHSNGYNYLD | 1801 | LGSNRAS | 1841 | MQALQTPYT | 1881 |
| 139111 | KSSQSLLRNDGKTPLY | 1802 | EVSNRFS | 1842 | MQNIQFPS | 1882 |
| 139100 | RSSQSLLHSNGYNYLN | 1803 | LGSKRAS | 1843 | MQALQTPYT | 1883 |
| 139101 | RASQSISSYLN | 1804 | GASTLAS | 1844 | QQSYKRAS | 1884 |
| 139102 | RSSQSLLYSNGYNYVD | 1805 | LGSNRAS | 1845 | MQGRQFPYS | 1885 |
| 139104 | RASQSVSSNLA | 1806 | GASTRAS | 1846 | QQYGSSLT | 1886 |
| 139106 | RASQSVSSKLA | 1807 | GASIRAT | 1847 | QQYGSSSWT | 1887 |
| 139107 | RASQSVGSTNLA | 1808 | DASNRAT | 1848 | QQYGSSPPWT | 1888 |
| 139108 | RASQSISSYLN | 1809 | AASSLQS | 1849 | QQSYTLA | 1889 |
| 139110 | KSSESLVHNSGKTYLN | 1810 | EVSNRDS | 1850 | MQGTHWPGT | 1890 |
| 139112 | QASEDINKFLN | 1811 | DASTLQT | 1851 | QQYESLPLT | 1891 |
| 139113 | RASQSVGSNLA | 1812 | GASTRAT | 1852 | QQYNDWLPVT | 1892 |
| 139114 | RASQSIGSSSLA | 1813 | GASSRAS | 1853 | QQYAGSPPFT | 1893 |
| 149362 | KASQDIDDAMN | 1814 | SATSPVP | 1854 | LQHDNFPLT | 1894 |
| 149363 | RASQDIYNNLA | 1815 | AANKSQS | 1855 | QHYYRFPYS | 1895 |
| 149364 | RSSQSLLHSNGYNYLD | 1816 | LGSNRAS | 1856 | MQALQTPYT | 1896 |
| 149365 | GGNNIGTKSVH | 1817 | DDSVRPS | 1857 | QVWDSDSEHVV | 1897 |
| 149366 | SGDGLSKKYVS | 1818 | RDKERPS | 1858 | QAWDDTTVV | 1898 |
| 149367 | RASQGIRNWLA | 1819 | AASNLQS | 1859 | QKYNSAPFT | 1899 |
| 149368 | GGNNIGSKSVH | 1820 | GKNNRPS | 1860 | SSRDSSGDHLRV | 1900 |
| 149369 | QGDSLGNYYAT | 1821 | GTNNRPS | 1861 | NSRDSSGHHLL | 1901 |
| BCMA_EBB- | RASQSVSSAYLA | 1822 | GASTRAT | 1862 | QHYGSSFNGS | 1902 |
| C1978-A4 | | | | | SLFT | |
| BCMA_EBB- | RASQSVSNSLA | 1823 | DASSRAT | 1863 | QQFGTSSGLT | 1903 |
| C1978-G1 | | | | | | |
| BCMA_EBB- | RASQSVSSSFLA | 1824 | GASSRAT | 1864 | QQYHSSPSWT | 1904 |
| C1979-C1 | | | | | | |
| BCMA_EBB- | RASQSVSTTFLA | 1825 | GSSNRAT | 1865 | QQYHSSPSWT | 1905 |
| C1978-C7 | | | | | | |
| BCMA_EBB- | RASQSISSYLN | 1826 | AASSLQS | 1866 | QQSYSTPYS | 1906 |
| C1978-D10 | | | | | | |
| BCMA_EBB- | RATQSIGSSFLA | 1827 | GASQRAT | 1867 | QHYESSPSWT | 1907 |
| C1979-C12 | | | | | | |
| BCMA_EBB- | RASQSVSSSYLA | 1828 | GASSRAT | 1868 | QQYGSPPRFT | 1908 |
| C1980-G4 | | | | | | |
| BCMA_EBB- | RASQSVSSSYLA | 1829 | GASSRAT | 1869 | QHYGSSPSWT | 1909 |
| C1980-D2 | | | | | | |
| BCMA_EBB- | RASQRVASNYLA | 1830 | GASSRAT | 1870 | QHYDSSPSWT | 1910 |
| C1978-A10 | | | | | | |
| BCMA_EBB- | RASQSLSSNFLA | 1831 | GASNWAT | 1871 | QYYGTSPMYT | 1911 |
| C1978-D4 | | | | | | |
| BCMA_EBB- | RSSQSLLHSNGYNYLD | 1832 | LGSNRAS | 1872 | MQALQTPLT | 1912 |
| C1980-A2 | | | | | | |
| BCMA_EBB- | RASQSVSSSYLA | 1833 | GTSSRAT | 1873 | QHYGNSPPKFT | 1913 |
| C1981-C3 | | | | | | |
| BCMA_EBB- | RASQSVASSFLA | 1834 | GASGRAT | 1874 | QHYGGSPRLT | 1914 |
| C1978-G4 | | | | | | |
| A7D12.2 | RASQDVNTAVS | 1835 | SASYRYT | 1875 | QQHYSTPWT | 1915 |
| C11D5.3 | RASESVSVIGAHLIH | 1836 | LASNLET | 1876 | LQSRIFPRT | 1916 |
| C12A3.2 | RASESVTILGSHLIY | 1837 | LASNVQT | 1877 | LQSRTIPRT | 1917 |
| C13F12.1 | RASESVTILGSHLIY | 1838 | LASNVQT | 1878 | LQSRTIPRT | 1918 |

[0713] In certain embodiments, the CAR molecule described herein (e.g., the CAR nucleic acid or the CAR polypeptide) or a BCMA binding domain includes:
[0714] (1) one, two, or three light chain (LC) CDRs chosen from one of the following:
   [0715] (i) a LC CDR1 of SEQ ID NO: 1320, LC CDR2 of SEQ ID NO: 1360 and LC CDR3 of SEQ ID NO: 1400 of BCMA-4 CAR (139103);
   [0716] (ii) a LC CDR1 of SEQ ID NO: 1319, LC CDR2 of SEQ ID NO: 1359 and LC CDR3 of SEQ ID NO: 1399 of BCMA-10 CAR (139109);
   [0717] (iii) a LC CDR1 of SEQ ID NO: 1331, LC CDR2 of SEQ ID NO: 1371 and LC CDR3 of SEQ ID NO: 1411 of BCMA-13 CAR (139112); or
   [0718] (iv) a LC CDR1 of SEQ ID NO: 1333, LC CDR2 of SEQ ID NO: 1373 and LC CDR3 of SEQ ID NO: 1413 of BCMA-15 CAR (139114), and/or
[0719] (2) one, two, or three heavy chain (HC) CDRs from one of the following:
   [0720] (i) a HC CDR1 of SEQ ID NO: 1200, HC CDR2 of SEQ ID NO: 1240 and HC CDR3 of SEQ ID NO: 1280 of BCMA-4 CAR (139103);
   [0721] (ii) a HC CDR1 of SEQ ID NO: 1199, HC CDR2 of SEQ ID NO: 1239 and HC CDR3 of SEQ ID NO: 1279 of BCMA-10 CAR (139109);
   [0722] (iii) a HC CDR1 of SEQ ID NO: 1121, HC CDR2 of SEQ ID NO: 1251 and HC CDR3 of SEQ ID NO: 1291 of BCMA-13 CAR (139112); or
   [0723] (iv) a HC CDR1 of SEQ ID NO: 1213, HC CDR2 of SEQ ID NO: 1253 and HC CDR3 of SEQ ID NO: 1293 of BCMA-15 (139114).

[0724] In certain embodiments, the CAR molecule described herein (e.g., the CAR nucleic acid or the CAR polypeptide) includes:
[0725] (1) one, two, or three light chain (LC) CDRs chosen from one of the following:
[0726] (i) a LC CDR1 of SEQ ID NO: 1560, LC CDR2 of SEQ ID NO: 1600 and LC CDR3 of SEQ ID NO: 1640 of BCMA-4 CAR (139103);
[0727] (ii) a LC CDR1 of SEQ ID NO: 1559, LC CDR2 of SEQ ID NO: 1599 and LC CDR3 of SEQ ID NO: 1639 of BCMA-10 CAR (139109);
[0728] (iii) a LC CDR1 of SEQ ID NO: 1571, LC CDR2 of SEQ ID NO: 1611 and LC CDR3 of SEQ ID NO: 1651 of BCMA-13 CAR (139112); or
[0729] (iv) a LC CDR1 of SEQ ID NO: 1573, LC CDR2 of SEQ ID NO: 1613 and LC CDR3 of SEQ ID NO: 1653 of BCMA-15 CAR (139114); and/or
[0730] (2) one, two, or three heavy chain (HC) CDRs chosen from one of the following:
[0731] (i) a HC CDR1 of SEQ ID NO: 1440, HC CDR2 of SEQ ID NO: 1480 and HC CDR3 of SEQ ID NO: 1520 of BCMA-4 CAR (139103);
[0732] (ii) a HC CDR1 of SEQ ID NO: 1439, HC CDR2 of SEQ ID NO: 1479 and HC CDR3 of SEQ ID NO: 1519 of BCMA-10 CAR (139109);
[0733] (iii) a HC CDR1 of SEQ ID NO: 1451, HC CDR2 of SEQ ID NO: 1491 and HC CDR3 of SEQ ID NO: 1531 of BCMA-13 CAR (139112); or
[0734] (iv) a HC CDR1 of SEQ ID NO: 1453, HC CDR2 of SEQ ID NO: 1493 and HC CDR3 of SEQ ID NO: 1533 of BCMA-15 CAR (139114).

[0735] In certain embodiments, the CAR molecule described herein (e.g., the CAR nucleic acid or the CAR polypeptide) includes:
[0736] (1) one, two, or three light chain (LC) CDRs chosen from one of the following:
   [0737] (i) a LC CDR1 of SEQ ID NO: 1800 LC CDR2 of SEQ ID NO: 1840 and LC CDR3 of SEQ ID NO: 1880 of BCMA-4 CAR (139103);
   [0738] (ii) a LC CDR1 of SEQ ID NO: 1799, LC CDR2 of SEQ ID NO: 1839 and LC CDR3 of SEQ ID NO: 1879 of BCMA-10 CAR (139109);
   [0739] (iii) a LC CDR1 of SEQ ID NO: 1811, LC CDR2 of SEQ ID NO: 1851 and LC CDR3 of SEQ ID NO: 1891 of BCMA-13 CAR (139112); or
   [0740] (iv) a LC CDR1 of SEQ ID NO: 1813, LC CDR2 of SEQ ID NO: 1853 and LC CDR3 of SEQ ID NO: 1893 of BCMA-15 CAR (139114); and/or
[0741] (2) one, two, or three heavy chain (HC) CDRs chosen from one of the following:
   [0742] (i) a HC CDR1 of SEQ ID NO: 1680, HC CDR2 of SEQ ID NO: 1720 and HC CDR3 of SEQ ID NO: 1760 of BCMA-4 CAR (139103);
   [0743] (ii) a HC CDR1 of SEQ ID NO: 1679, HC CDR2 of SEQ ID NO: 1719 and HC CDR3 of SEQ ID NO: 1759 of BCMA-10 CAR (139109);
   [0744] (iii) a HC CDR1 of SEQ ID NO: 1691, HC CDR2 of SEQ ID NO: 1731 and HC CDR3 of SEQ ID NO: 1771 of BCMA-13 CAR (139112);
   [0745] (iv) a HC CDR1 of SEQ ID NO: 1693, HC CDR2 of SEQ ID NO: 1733 and HC CDR3 of SEQ ID NO: 1773 of BCMA-15 CAR (139114).
      Exemplary components of the CAR molecules:

Leader (amino acid sequence)
(SEQ ID NO: 1919)
MALPVTALLLPLALLLHAARP
leader (nucleic acid sequence)
(SEQ ID NO: 1920)
ATGGCCCTGCCTGTGACAGCCCTGCTGCTGCCTCTGGCTCTGCTGCTGCATGCCG
CTAGACCC
leader (nucleic acid sequence)
(SEQ ID NO: 1942)
ATGGCCCTCCCTGTCACCGCCCTGCTGCTTCCGCTGGCTCTTCTGCTCCACGCCG
CTCGGCCC
CD8 hinge (amino acid sequence)
(SEQ ID NO: 1921)
TTTPAPRPPTPAPTIASQPLSLRPEACRPAAGGAVHTRGLDFACD
CD8 hinge (nucleic acid sequence)
(SEQ ID NO: 1922)
ACCACGACGCCAGCGCCGCGACCACCAACACCGGCGCCCACCATCGCGTCGCA
GCCCCTGTCCCTGCGCCCAGAGGCGTGCCGGCCAGCGGCGGGGGGCGCAGTGC
ACACGAGGGGGCTGGACTTCGCCTGTGAT
CD8 transmembrane (amino acid sequence)
(SEQ ID NO: 1923)
IYIWAPLAGTCGVLLLSLVITLYC
CD8 transmembrane (nucleic acid sequence)
(SEQ ID NO: 1924)
ATCTACATCTGGGCGCCCTTGGCCGGGACTTGTGGGGTCCTTCTCCTGTCACTGG
TTATCACCCTTTACTGC
CD8 transmembrane (nucleic acid sequence)
(SEQ ID NO: 1943)
ATCTACATTTGGGCCCCTCTGGCTGGTACTTGCGGGGTCCTGCTGCTTTCACTCG
TGATCACTCTTTACTGT
4-1BB Intracellular domain (amino acid sequence)
(SEQ ID NO: 1925)
KRGRKKLLYIFKQPFMRPVQTTQEEDGCSCRFPEEEEGGCEL
4-1BB Intracellular domain (nucleic acid sequence)
(SEQ ID NO: 1926)
AAACGGGGCAGAAAGAAACTCCTGTATATATTCAAACAACCATTTATGAGACC
AGTACAAACTACTCAAGAGGAAGATGGCTGTAGCTGCCGATTTCCAGAAGAAG
AAGAAGGAGGATGTGAACTG
4-1BB Intracellular domain (nucleic acid sequence)
(SEQ ID NO: 1944)
AAGCGCGGTCGGAAGAAGCTGCTGTACATCTTTAAGCAACCCTTCATGAGGCCT
GTGCAGACTACTCAAGAGGAGGACGGCTGTTCATGCCGGTTCCCAGAGGAGGA
GGAAGGCGGCTGCGAACTG
CD28 Intracellular domain (amino acid sequence)
(SEQ ID NO: 1927)
RSKRSRLLHSDYMNMTPRRPGPTRKHYQPYAPPRDFAAYRS (SEQ ID NO: 1927)
CD28 Intracellular domain (nucleotide sequence)
(SEQ ID NO: 1928)
AGGAGTAAGAGGAGCAGGCTCCTGCACAGTGACTACATGAACATGACTCCC
CGCCGCCCCGGGCCCACCCGCAAGCATTACCAGCCCTATGCCCCACCACGCGAC
TTCGCAGCCTATCGCTCC (SEQ ID NO: 1928)
ICOS Intracellular domain (amino acid sequence)
(SEQ ID NO: 1929)
T K K K Y S S S V H D P N G E Y M F M R A V N T A K K
S R L T D V T L (SEQ ID NO: 1929)
ICOS Intracellular domain (nucleotide sequence)
(SEQ ID NO: 1930)
ACAAAAAAGAAGTATTCATCCAGTGTGCACGACCCTAACGGTGAATACATG
TTCATGAGAGCAGTGAACACAGCCAAAAAATCCAGACTCACAGATGTGACCCT
A (SEQ ID NO: 1930)
CD3 zeta domain (amino acid sequence)
(SEQ ID NO: 1931)
RVKFSRSADAPAYKQGQNQLYNELNLGRREEYDVLDKRRGRDPEMGGKPRRKNP
QEGLYNELQKDKMAEAYSEIGMKGERRRGKGHDGLYQGLSTATKDTYDALHMQ
ALPPR
CD3 zeta (nucleic acid sequence)
(SEQ ID NO: 1932)
AGAGTGAAGTTCAGCAGGAGCGCAGACGCCCCCGCGTACAAGCAGGGCCAGAA
CCAGCTCTATAACGAGCTCAATCTAGGACGAAGAGAGGAGTACGATGTTTTGG
ACAAGAGACGTGGCCGGGACCCTGAGATGGGGGGAAAGCCGAGAAGGAAGAA
CCCTCAGGAAGGCCTGTACAATGAACTGCAGAAAGATAAGATGGCGGAGGCCT
ACAGTGAGATTGGGATGAAAGGCGAGCGCCGGAGGGGCAAGGGGCACGATGG
CCTTTACCAGGGTCTCAGTACAGCCACCAAGGACACCTACGACGCCCTTCACAT
GCAGGCCCTGCCCCCTCGC
CD3 zeta (nucleic acid sequence)
(SEQ ID NO: 1945)
CGCGTGAAATTCAGCCGCAGCGCAGATGCTCCAGCCTACAAGCAGGGGCAGAA
CCAGCTCTACAACGAACTCAATCTTGGTCGGAGAGAGGAGTACGACGTGCTGG
ACAAGCGGAGAGGACGGGACCCAGAAATGGGCGGGAAGCCGCGCAGAAAGAA
TCCCCAAGAGGGCCTGTACAACGAGCTCCAAAAGGATAAGATGGCAGAAGCCT
ATAGCGAGATTGGTATGAAAGGGGAACGCAGAAGAGGCAAAGGCCACGACGG
ACTGTACCAGGGACTCAGCACCGCCACCAAGGACACCTATGACGCTCTTCACAT
GCAGGCCCTGCCGCCTCGG
CD3 zeta domain (amino acid sequence; NCBI Reference
NM_000734.3)
(SEQ ID NO: 1933)
RVKFSRSADAPAYQQGQNQLYNELNLGRREEYDVLDKRRGRDPEMGGKPRRKNP
QEGLYNELQKDKMAEAYSEIGMKGERRRGKGHDGLYQGLSTATKDTYDALHMQ
ALPPR
CD3 zeta (nucleic acid sequence; NCBI Reference
Sequence NM_000734.3);
(SEQ ID NO: 1934)
AGAGTGAAGTTCAGCAGGAGCGCAGACGCCCCCGCGTACCAGCAGGGCCAG
AACCAGCTCTATAACGAGCTCAATCTAGGACGAAGAGAGGAGTACGATGTTT
TGGACAAGAGACGTGGCCGGGACCCTGAGATGGGGGGAAAGCCGAGAAGGA
AGAACCCTCAGGAAGGCCTGTACAATGAACTGCAGAAAGATAAGATGGCGG
AGGCCTACAGTGAGATTGGGATGAAAGGCGAGCGCCGGAGGGGCAAGGGGC
ACGATGGCCTTTACCAGGGTCTCAGTACAGCCACCAAGGACACCTACGACGC
CCTTCACATGCAGGCCCTGCCCCCTCGC
IgG4 Hinge (amino acid sequence)
(SEQ ID NO: 1935)
ESKYGPPCPPCPAPEFLGGPSVFLFPPKPKDTLMISRTPEVTCVVVDVS
QEDPEVQFNWYVDGVEVHNAKTKPREEQFNSTYRVVSVLTVLHQDWLNGKEYKC
KVSNKGLPSSIEKTISKAKGQPREPQVYTLPPSQEEMTKNQVSLTCLVKGFYPSDIA
VEWESNGQPENNYKTTPPVLDSDGSFFLYSRLTVDKSRWQEGNVFSCSVMHEALH
NHYTQKSLSLSLGKM
IgG4 Hinge (nucleotide sequence)
(SEQ ID NO: 1936)
GAGAGCAAGTACGGCCCTCCCTGCCCCCCTTGCCCTGCCCCCGAG
TTCCTGGGCGGACCCAGCGTGTTCCTGTTCCCCCCCAAGCCCAAGGACACCCTG
ATGATCAGCCGGACCCCCGAGGTGACCTGTGTGGTGGTGGACGTGTCCCAGGA
GGACCCCGAGGTCCAGTTCAACTGGTACGTGGACGGCGTGGAGGTGCACAACG
CCAAGACCAAGCCCCGGGAGGAGCAGTTCAATAGCACCTACCGGGTGGTGTCC
GTGCTGACCGTGCTGCACCAGGACTGGCTGAACGGCAAGGAATACAAGTGTAA
GGTGTCCAACAAGGGCCTGCCCAGCAGCATCGAGAAAACCATCAGCAAGGCCA
AGGGCCAGCCTCGGGAGCCCCAGGTGTACACCCTGCCCCCTAGCCAAGAGGAG
ATGACCAAGAACCAGGTGTCCCTGACCTGCCTGGTGAAGGGCTTCTACCCCAGC
GACATCGCCGTGGAGTGGGAGAGCAACGGCCAGCCCGAGAACAACTACAAGAC
CACCCCCCCTGTGCTGGACAGCGACGGCAGCTTCTTCCTGTACAGCCGGCTGAC
CGTGGACAAGAGCCGGTGGCAGGAGGGCAACGTCTTTAGCTGCTCCGTGATGC
ACGAGGCCCTGCACAACCACTACACCCAGAAGAGCCTGAGCCTGTCCCTGGGC
AAGATG

[0746] In an embodiment, the CAR molecule comprises a mesothelin CAR described herein, e.g., a mesothelin CAR described in WO 2015/090230, incorporated herein by reference. In embodiments, the mesothelin CAR comprises an amino acid, or has a nucleotide sequence shown in WO 2015/090230 incorporated herein by reference, or a sequence substantially identical to any of the aforesaid sequences (e.g., at least 85%, 90%, 95% or more identical to any of the aforesaid mesothelin CAR sequences). In one embodiment, the CAR molecule comprises a mesothelin CAR, or an antigen binding domain according to Tables 2-3, or a sequence substantially identical thereto (e.g., at least 85%, 90%, 95% or more identical thereto). The amino acid and nucleotide sequences encoding the mesothelin CAR molecules and antigen binding domains (e.g., including one, two, three VH CDRs; and one, two, three VL CDRs according to Kabat or Chothia), are specified in WO 2015/090230.

[0747] In an embodiment, the CAR molecule comprises a CLL1 CAR described herein, e.g., a CLL1 CAR described in US2016/0051651A1, incorporated herein by reference. In embodiments, the CLL1 CAR comprises an amino acid, or has a nucleotide sequence shown in US2016/0051651A1, incorporated herein by reference, or a sequence substantially identical to any of the aforesaid sequences (e.g., at least 85%, 90%, 95% or more identical to any of the aforesaid CLL1 CAR sequences).

[0748] In other embodiments, the CLL1 CAR includes a CAR molecule, or an antigen binding domain according to Table 2 of WO2016/014535, incorporated herein by reference, or a sequence substantially identical to any of the aforesaid sequences (e.g., at least 85%, 90%, 95% or more identical to any of the aforesaid CLL1 CAR sequences). The amino acid and nucleotide sequences encoding the CLL-1 CAR molecules and antigen binding domains (e.g., including one, two, three VH CDRs; and one, two, three VL CDRs according to Kabat or Chothia), are specified in WO2016/014535.

[0749] In an embodiment, the CAR molecule comprises a CD33 CAR described herein, e.g., a CD33 CAR described in US2016/0096892A1, incorporated herein by reference. In embodiments, the CD33 CAR comprises an amino acid, or has a nucleotide sequence shown in US2016/0096892A1, incorporated herein by reference, or a sequence substantially identical to any of the aforesaid sequences (e.g., at least 85%, 90%, 95% or more identical to any of the aforesaid CD33 CAR sequences). In other embodiments, the CD33 CAR CAR or antigen binding domain thereof can include a CAR molecule (e.g., any of CAR33-1 to CAR-33-9), or an antigen binding domain according to Table 2 or 9 of WO2016/014576, incorporated herein by reference, or a sequence substantially identical to any of the aforesaid sequences (e.g., at least 85%, 90%, 95% or more identical to any of the aforesaid CD33 CAR sequences). The amino acid and nucleotide sequences encoding the CD33 CAR molecules and antigen binding domains (e.g., including one, two, three VH CDRs; and one, two, three VL CDRs according to Kabat or Chothia), are specified in WO2016/014576.

[0750] In embodiments, the CAR molecule comprises a CD123 CAR described herein, e.g., a CD123 CAR described in US2014/0322212A1 or US2016/0068601A1, both incorporated herein by reference. In embodiments, the CD123 CAR comprises an amino acid, or has a nucleotide sequence shown in US2014/0322212A1 or US2016/0068601A1, both incorporated herein by reference, or a sequence substantially identical to any of the aforesaid sequences (e.g., at least 85%, 90%, 95% or more identical to any of the aforesaid CD123 CAR sequences). In one embodiment, the CAR molecule comprises a CD123 CAR (e.g., any of the CAR1-CAR8), or an antigen binding domain according to Tables 1-2 of WO 2014/130635, incorporated herein by reference, or a sequence substantially identical thereto (e.g., at least 85%, 90%, 95% or more identical to any of the aforesaid CD123 CAR sequences). The amino acid and nucleotide sequences encoding the CD123 CAR molecules and antigen binding domains (e.g., including one, two, three VH CDRs; and one, two, three VL CDRs according to Kabat or Chothia), are specified in WO 2014/130635.

[0751] In other embodiments, the CAR molecule comprises a CD123 CAR comprises a CAR molecule (e.g., any of the CAR123-1 to CAR123-4 and hzCAR123-1 to hzCAR123-32), or an antigen binding domain according to Tables 2, 6, and 9 of WO2016/028896, incorporated herein by reference, or a sequence substantially identical thereto (e.g., at least 85%, 90%, 95% or more identical to any of the aforesaid CD123 CAR sequences). The amino acid and nucleotide sequences encoding the CD123 CAR molecules and antigen binding domains (e.g., including one, two, three VH CDRs; and one, two, three VL CDRs according to Kabat or Chothia), are specified in WO2016/028896.

[0752] In an embodiment, the CAR molecule comprises an EGFRvIII CAR molecule described herein, e.g., an EGFRvIII CAR described US2014/0322275A1, incorporated herein by reference. In embodiments, the EGFRvIII CAR comprises an amino acid, or has a nucleotide sequence shown in US2014/0322275A1, incorporated herein by reference, or a sequence substantially identical to any of the aforesaid sequences (e.g., at least 85%, 90%, 95% or more identical to any of the aforesaid EGFRvIII CAR sequences). In one embodiment, the CAR molecule comprises an EGFRvIII CAR, or an antigen binding domain according to Table 2 or SEQ ID NO:11 of WO 2014/130657, incorporated herein by reference, or a sequence substantially identical thereto (e.g., at least 85%, 90%, 95% or more identical thereto). The amino acid and nucleotide sequences encoding the EGFRvIII CAR molecules and antigen binding domains (e.g., including one, two, three VH CDRs; and one, two, three VL CDRs according to Kabat or Chothia), are specified in WO 2014/130657.

[0753] In other embodiments, the CAR molecule comprises an a GFR ALPHA-4 CAR, e.g., can include a CAR molecule, or an antigen binding domain according to Table 2 of WO2016/025880, incorporated herein by reference, or a sequence substantially identical to any of the aforesaid sequences (e.g., at least 85%, 90%, 95% or more identical to any of the aforesaid GFR ALPHA-4 sequences). The amino acid and nucleotide sequences encoding the GFR ALPHA-4 CAR molecules and antigen binding domains (e.g., including one, two, three VH CDRs; and one, two, three VL CDRs according to Kabat or Chothia), are specified in WO2016/025880.

[0754] In other embodiments, the CAR molecule comprises an axicabtagene ciloleucel molecule, or one or more sequences of an axicabtagene ciloleucel molecule (Table 15). In one embodiment, the CAR molecule comprises a VL that is at least 85%, 90%, 95%, 98%, 99%, or 100% identical to SEQ ID NO: 409. In one embodiment, the CAR molecule comprises a VH that is at least 85%, 90%, 95%. 98%, 99%, or 100% identical to SEQ ID NO: 410. In one embodiment, the CAR molecule comprises an scFv that is at least 85%, 90%, 95%, 98%, 99%, or 100% identical to SEQ ID NO: 411. In one embodiment, the CAR molecule comprises a sequence at least 85%, 90%, 95%, 98%, 99%, or 100% identical to SEQ ID NO: 412. In one embodiment, the CAR molecule comprises a sequence at least 85%, 90%, 95%, 98%, 99%, or 100% identical to SEQ ID NO: 413 (mut 2). In one embodiment, the CAR molecule comprises a sequence at least 85%, 90%, 95%, 98%, 99%, or 100% identical to SEQ ID NO: 414 (mut 3).

TABLE 15
Axicabtagene ciloleucel sequences

| SEQ | | |
|---|---|---|
| ID NO | Domain | Sequence |
| 409 | VL | DIQMTQTTSSLSASLGDRVTISCRASQDISKYLNWYQQ |
| | | KPDGTVKLLIYHTSRLHSGVPSRFSGSGSGTDYSLTISNLEQEDIATYF |
| | | CQQGNTLPYTFGGGTKLEIT |
| 410 | VH | EVKLQESGPGLVAPSQSLSVTCTVSGVSLPDYG |
| | | VSWIRQPPRKGLEWLGVIWGSETTYYNSALKSRLTIIKDNSKSQVFLK |
| | | MNSLQTDDTAIYYCAKHYYYGGSYAMDYWGQGTSVTVSS |
| 411 | ScFv | DIQMTQTTSSLSASLGDRVTISCRASQDISKYLNWYQQ |
| | | KPDGTVKLLIYHTSRLHSGVPSRFSGSGSGTDYSLTISNLEQEDIATYF |
| | | CQQGNTLPYTFGGGTKLEITGSTSGSGKPGSGEGSTKGEVKLQESGPG |
| | | LVAPSQSLSVTCTVSGVSLPDYGVSWIRQPPRKGLEWLGVIWGSETTY |
| | | YNSALKSRLTIIKDNSKSQVFLKMNSLQTDDTAIYYCAKHYYYGGSYA |
| | | MDYWGQGTSVTVSS |
| 412 | Full | MLLLVTSLLLCELPHPAFLLIPDIQMTQTTSSLSASLGDRVTISCRASQDISKYLNWYQQK |
| | (1) | PDGTVKLLIYHTSRLHSGVPSRFSGSGSGTDYSLTISNLEQEDIATYFCQQGNTLPYTFGG |
| | | GTKLEITGSTSGSGKPGSGEGSTKGEVKLQESGPGLVAPSQSLSVTCTVSGVSLPDYGVS |
| | | WIRQPPRKGLEWLGVIWGSETTYYNSALKSRLTIIKDNSKSQVFLKMNSLQTDDTAIYYC |
| | | AKHYYYGGSYAMDYWGQGTSVTVSSAAAIEVMYPPPYLDNEKSNGTIIHVKGKHLCPS |
| | | PLFPGPSKPFWVLVVVGGVLACYSLLVTVAFIIFWVRSKRSRLLHSDYMFMTPRRPGPT |
| | | RKHYQPYAPPRDFAAYRSRVKFSRSADAPAYQQGQNQLYNELNLGRREEYDVLDKRR |
| | | GRDPEMGGKPRRKNPQEGLYNELQKDKMAEAYSEIGMKGERRRGKGHDGLYQGLSTATKD |
| | | TYDALHMQALPPR |
| 413 | Full | MLLLVTSLL LCELPHPAFL LIPDIQMTQT TSSLSASLGD |
| | (2) | RVTISCRASQ DISKYLNWYQ QKPDGTVKLL IYHTSRLHSG |
| | | VPSRFSGSGS GTDYSLTISN LEQEDIATYF CQQGNTLPYT |
| | | FGGGTKLEIT GSTSGSGKPG SGEGSTKGEV KLQESGPGLV |
| | | APSQSLSVTC TVSGVSLPDY GVSWIRQPPR KGLEWLGVIW |
| | | GSETTYYNSA LKSRLTIIKD NSKSQVFLKM NSLOTDDTAI |
| | | YYCAKHYYYG GSYAMDYWGQ GTSVTVSSAA AIEVMYPPPY |
| | | LDNEKSNGTI IHVKGKHLCP SPLFPGPSKP FWVLVVVGGV |
| | | LACYSLLVTV AFIIFWVRSK RSRLLHSDFM NMTPRRPGPT |
| | | RKHYQPYAPP RDFAAYRSRV KFSRSADAPA YQQGQNQLYN |
| | | ELNLGRREEY DVLDKRRGRD PEMGGKPRRK NPQEGLYNEL |
| | | QKDKMAEAYS EIGMKGERRR GKGHDGLYQG LSTATKDTYD |
| | | ALHMQALPPR |
| 414 | Full | MLLLVTSLLL CELPHPAFLL IPDIQMTQTT SSLSASLGDR |
| | (3) | VTISCRASQD ISKYLNWYQQ KPDGTVKLLI YHTSRLHSGV |
| | | PSRFSGSGSG TDYSLTISNL EQEDIATYFC QQGNTLPYTF |
| | | GGGTKLEITG STSGSGKPGS GEGSTKGEVK LQESGPGLVA |
| | | PSQSLSVTCT VSGVSLPDYG VSWIRQPPRK GLEWLGVIWG |
| | | SETTYYNSAL KSRLTIIKDN SKSQVFLKMN SLQTDDTAIY |
| | | YCAKHYYYGG SYAMDYWGQG TSVTVSSAAA IEVMYPPPYL |
| | | DNEKSNGTII HVKGKHLCPS PLFPGPSKPF WVLVVVGGVL |
| | | ACYSLLVTVA FIIFWVRSKR SRLLHSDFMF MTPRRPGPTR |
| | | KHYQPYAPPR DFAAYRSRVK FSRSADAPAY QQGQNQLYNE |
| | | LNLGRREEYD VLDKRRGRDP EMGGKPRRKN PQEGLYNELQ |
| | | KDKMAEAYSE IGMKGERRRG KGHDGLYQGL STATKDTYDA |
| | | LHMQALPPR |

[0755] In other embodiments, the CAR molecule comprises one or more sequences selected from Table 16. In one embodiment, the CAR molecule comprises a VL that is at least 85%, 90%, 95%, 98%, 99%, or 100% identical to SEQ ID NO: 415. In one embodiment, the CAR molecule comprises a VH that is at least 85%, 90%, 95%, 98%, 99%, or 100% identical to SEQ ID NO: 416. In one embodiment, the CAR molecule comprises an ScFv that is at least 85%, 90%, 95%, 98%, 99%, or 100% identical to SEQ ID NO: 417. In one embodiment, the CAR molecule comprises a sequence at least 85%, 90%, 95% or more identical to SEQ ID NO: 418. In one embodiment, the CAR molecule comprises a sequence at least 85%, 90%, 95%, 98%, 99%, or 100% identical to SEQ ID NO: 419. In one embodiment, the CAR molecule comprises a sequence at least 85%, 90%, 95%, 98%, 99%, or 100% identical to SEQ ID NO: 420.

TABLE 16

| SEQ ID | | |
|---|---|---|
| NO | Domain | Sequence |
| 415 | VL | ELVLTQSPKFMSTSVGDRVSVTCKASQNVGTNVAWYQQKPGQSPKPLI |
| | | YSATYRNSGVPDRFTGSGSGTDFTLTITNVQSKDLADYFCQYNRYPYTSF |
| | | FFTKLEIKRRS |
| 416 | VH | QVQLLESGAELVRPGSSVKISCKASGYAFSSYWMNWVKQRPGQGLEWI |
| | | GQIYPGDGDTNYNGKFKGQATLTADKSSSTAYMQLSGLTSEDSAVYSC |
| | | ARKTISSVVDFYFDYWGQGTTVT |
| 417 | ScFv | QVQLLESGAELVRPGSSVKISCKASGYAFSSYWMNWVKQRPGQGLEWI |
| | | GQIYPGDGDTNYNGKFKGQATLTADKSSSTAYMQLSGLTSEDSAVYSC |
| | | ARKTISSVVDFYFDYWGQGTTVTGGGSGGGSGGGSGGGSELVLTQSPKF |
| | | MSTSVGDRVSVTCKASQNVGTNVAWYQQKPGQSPKPLIYSATYRNSGV |
| | | PDRFTGSGSGTDFTLTITNVQSKDLADYFCQYNRYPYTSFFFTKLEIKRRS |
| 418 | Full | QVQLLESGAELVRPGSSVKISCKASGYAFSSYWMNWVKQRPGQGLEWI |
| | (1) | GQIYPGDGDTNYNGKFKGQATLTADKSSSTAYMQLSGLTSEDSAVYSC |
| | | ARKTISSVVDFYFDYWGQGTTVTGGGSGGGSGGGSGGGSELVLTQSPKF |
| | | MSTSVGDRVSVTCKASQNVGTNVAWYQQKPGQSPKPLIYSATYRNSGV |
| | | PDRFTGSGSGTDFTLTITNVQSKDLADYFCQYNRYPYTSFFFTKLEIKRRS |
| | | KIEVMYPPPYLDNEKSNGTIIHVKGKHLCPSPLFPGPSKPFWVLVVVGGV |
| | | LACYSLLVTVAFIIFWV |
| | | RSKRSRLLHSDYMFMTPRRPGPTRKHYQPYAPPRDFAAYRS |
| | | RVKFSRSADAPAYQQGQNQLYNELNLGRREEYDVLDKRRGRDPEMGG |
| | | KPRRKNPQEGLYNELQKDKMAEAYSEIGMKGERRRGKGHDGLYQGLS |
| | | TATKDTYDALHMQALPPR |
| 419 | Full | QVQLLESGAELVRPGSSVKISCKASGYAFSSYWMNWVKQRPGQGLEWI |
| | (2) | GQIYPGDGDTNYNGKFKGQATLTADKSSSTAYMQLSGLTSEDSAVYSC |
| | | ARKTISSVVDFYFDYWGQGTTVTGGGSGGGSGGGSGGGSELVLTQSPKF |
| | | MSTSVGDRVSVTCKASQNVGTNVAWYQQKPGQSPKPLIYSATYRNSGV |
| | | PDRFTGSGSGTDFTLTITNVQSKDLADYFCQYNRYPYTSFFFTKLEIKRRS |
| | | KIEVMYPPPYLDNEKSNGTIIHVKGKHLCPSPLFPGPSKPFWVLVVVGGV |
| | | LACYSLLVTVAFIIFWV |
| | | RSKRSRLLHSDFMNMTPRRPGPTRKHYQPYAPPRDFAAYRS |
| | | RVKFSRSADAPAYQQGQNQLYNELNLGRREEYDVLDKRRGRDPEMGG |
| | | KPRRKNPQEGLYNELQKDKMAEAYSEIGMKGERRRGKGHDGLYQGLS |
| | | TATKDTYDALHMQALPPR |
| 420 | Full | QVQLLESGAELVRPGSSVKISCKASGYAFSSYWMNWVKQRPGQGLEWI |
| | (3) | GQIYPGDGDTNYNGKFKGQATLTADKSSSTAYMQLSGLTSEDSAVYSC |
| | | ARKTISSVVDFYFDYWGQGTTVTGGGSGGGSGGGSGGGSELVLTQSPKF |
| | | MSTSVGDRVSVTCKASQNVGTNVAWYQQKPGQSPKPLIYSATYRNSGV |
| | | PDRFTGSGSGTDFTLTITNVQSKDLADYFCQYNRYPYTSFFFTKLEIKRRS |
| | | KIEVMYPPPYLDNEKSNGTIIHVKGKHLCPSPLFPGPSKPFWVLVVVGGV |
| | | LACYSLLVTVAFIIFWV |
| | | RSKRSRLLHSDFMFMTPRRPGPTRKHYQPYAPPRDFAAYRS |
| | | RVKFSRSADAPAYQQGQNQLYNELNLGRREEYDVLDKRRGRDPEMGG |
| | | KPRRKNPQEGLYNELQKDKMAEAYSEIGMKGERRRGKGHDGLYQGLS |
| | | TATKDTYDALHMQALPPR |

[0756] In other embodiments, the CAR molecule comprises one or more sequences selected from Table 17. In one embodiment, the CAR molecule comprises a VL that is at least 85%, 90%,95%,98%,99%, or 10000 identical to SEQ ID NO: 421. In one embodiment, the CAR molecule comprises a VH that is at least 85%,90%,95%, 98%,99%, or 100% identical to SEQ ID NO: 422. In one embodiment, the CAR molecule comprises an ScFv that is at least 85%, 90%, 95%, 98%, 99%, or 100% identical to SEQ ID NO: 423.

TABLE 17

| SEQ | | |
|---|---|---|
| ID | | |
| NO | Domain | Sequence |
| 421 | VL | DIQMTQTT SSLSASLGDR VTISCRASQD |
| | | ISKYLNWYQQ KPDGTVKLLI YHTSRLHSGV |
| | | PSRFSGSGSG TDYSLTISNL EQEDIATYFC |
| | | QQGNTLPYTF GGGTKLEIT |
| 422 | VH | EVK LQESGPGLVA PSQSLSVTCT |
| | | VSGVSLPDYG VSWIRQPPRK GLEWLGVIWG |
| | | SETTYYNSAL KSRLTIIKDN SKSQVFLKMN |
| | | SLQTDDTAIY YCAKHYYYGG SYAMDYWGQG |
| | | TSVTVSSE |
| 423 | ScFv | DIQMTQTT SSLSASLGDR VTISCRASQD |
| | | ISKYLNWYQQ KPDGTVKLLI YHTSRLHSGV |
| | | PSRFSGSGSG TDYSLTISNL EQEDIATYFC |
| | | QQGNTLPYTF GGGTKLEITG STSGSGKPGS |
| | | GEGSTKGEVK LQESGPGLVA PSQSLSVTCT |
| | | VSGVSLPDYG VSWIRQPPRK GLEWLGVIWG |
| | | SETTYYNSAL KSRLTIIKDN SKSQVFLKMN |
| | | SLQTDDTAIY YCAKHYYYGG SYAMDYWGQG |
| | | TSVTVSSE |

[0757] In other embodiments, the CAR molecule comprises one or more sequences selected from Table 18. In one embodiment, the CAR molecule comprises a VL that is at least 85%, 90%, 95%, 98%, 99%, or 100% identical to SEQ ID NO: 424. In one embodiment, the CAR molecule comprises a VH that is at least 85%, 90%, 95%, 98%, 99%, or 100% identical to SEQ ID NO: 425. In one embodiment, the CAR molecule comprises an ScFv that is at least 85%, 90%, 95%, 98%, 99%, or 100% identical to SEQ ID NO: 426.

TABLE 18

| SEQ | | |
|---|---|---|
| ID | | |
| NO | Domain | Sequence |
| 424 | VL | DIVLTQSPPSLAMSLGKRATISCRASESV |
| | | TILGSHLIHWYQQKPGQPPTLLIQLASNV |
| | | QTGVPARFSGSGSRTDFTLTIDPVEEDDV |
| | | AVYYCLQSRTIPRTFGGGTKLEIK |
| 425 | VH | QIQLVQSGPELKKPGETVKISCKASGYTF |
| | | TDYSINWVKRAPGKGLKWMGWINTETREP |
| | | AYAYDFRGRFAFSLETSASTAYLQINNLK |
| | | YEDTATYFCALDYSYAMDYWGQGTSVTVS |
| | | S |
| 426 | ScFv | DIVLTQSPPSLAMSLGKRATISCRASESV |
| | | TILGSHLIHWYQQKPGQPPTLLIQLASNV |
| | | QTGVPARFSGSGSRTDFTLTIDPVEEDDV |
| | | AVYYCLQSRTIPRTFGGGTKLEIKGSTSG |
| | | SGKPGSGEGSTKGQIQLVQSGPELKKPGE |
| | | TVKISCKASGYTFTDYSINWVKRAPGKGL |
| | | KWMGWINTETREPAYAYDFRGRFAFSLET |
| | | SASTAYLQINNLKYEDTATYFCALDYSYA |
| | | MDYWGQGTSVTVSS |

### RNA Transfection

[0758] Disclosed herein are methods for producing an in vitro transcribed RNA CAR. The present invention also includes a CAR encoding RNA construct that can be directly transfected into a cell. A method for generating mRNA for use in transfection can involve in vitro transcription (IVT) of a template with specially designed primers, followed by polyA addition, to produce a construct containing 3′ and 5′ untranslated sequence (“UTR”), a 5′ cap and/or Internal Ribosome Entry Site (IRES), the nucleic acid to be expressed, and a polyA tail, typically 50-2000 bases in length (SEQ ID NO:32). RNA so produced can efficiently transfect different kinds of cells. In one aspect, the template includes sequences for the CAR.

[0759] In one aspect, a CAR of the present invention is encoded by a messenger RNA (mRNA). In one aspect, the mRNA encoding a CAR described herein is introduced into an immune effector cell, e.g., a T cell or a NK cell, for production of a CAR-expressing cell, e.g., a CART cell or a CAR NK cell.

[0760] In one embodiment, the in vitro transcribed RNA CAR can be introduced to a cell as a form of transient transfection. The RNA is produced by in vitro transcription using a polymerase chain reaction (PCR)-generated template. DNA of interest from any source can be directly converted by PCR into a template for in vitro mRNA synthesis using appropriate primers and RNA polymerase. The source of the DNA can be, for example, genomic DNA, plasmid DNA, phage DNA, cDNA, synthetic DNA sequence or any other appropriate source of DNA. The desired temple for in vitro transcription is a CAR described herein. For example, the template for the RNA CAR comprises an extracellular region comprising a single chain variable domain of an antibody to a tumor associated antigen described herein; a hinge region (e.g., a hinge region described herein), a transmembrane domain (e.g., a transmembrane domain described herein such as a transmembrane domain of CD8a); and a cytoplasmic region that includes an intracellular signaling domain, e.g., an intracellular signaling domain described herein, e.g., comprising the signaling domain of CD3-zeta and the signaling domain of 4-1BB.

[0761] In one embodiment, the DNA to be used for PCR contains an open reading frame. The DNA can be from a naturally occurring DNA sequence from the genome of an organism. In one embodiment, the nucleic acid can include some or all of the 5′ and/or 3′ untranslated regions (UTRs). The nucleic acid can include exons and introns. In one embodiment, the DNA to be used for PCR is a human nucleic acid sequence. In another embodiment, the DNA to be used for PCR is a human nucleic acid sequence including the 5′ and 3′ UTRs. The DNA can alternatively be an artificial DNA sequence that is not normally expressed in a naturally occurring organism. An exemplary artificial DNA sequence is one that contains portions of genes that are ligated together to form an open reading frame that encodes a fusion protein. The portions of DNA that are ligated together can be from a single organism or from more than one organism.

[0762] PCR is used to generate a template for in vitro transcription of mRNA which is used for transfection. Methods for performing PCR are well known in the art. Primers for use in PCR are designed to have regions that are substantially complementary to regions of the DNA to be used as a template for the PCR. “Substantially complementary,” as used herein, refers to sequences of nucleotides where a majority or all of the bases in the primer sequence are complementary, or one or more bases are non-complementary, or mismatched. Substantially complementary sequences are able to anneal or hybridize with the intended DNA target under annealing conditions used for PCR. The primers can be designed to be substantially complementary to any portion of the DNA template. For example, the primers can be designed to amplify the portion of a nucleic acid that is normally transcribed in cells (the open reading frame), including 5′ and 3′ UTRs. The primers can also be designed to amplify a portion of a nucleic acid that encodes a particular domain of interest. In one embodiment, the primers are designed to amplify the coding region of a human cDNA, including all or portions of the 5′ and 3′ UTRs. Primers useful for PCR can be generated by synthetic methods that are well known in the art. “Forward primers” are primers that contain a region of nucleotides that are substantially complementary to nucleotides on the DNA template that are upstream of the DNA sequence that is to be amplified. “Upstream” is used herein to refer to a location 5, to the DNA sequence to be amplified relative to the coding strand. “Reverse primers” are primers that contain a region of nucleotides that are substantially complementary to a double-stranded DNA template that are downstream of the DNA sequence that is to be amplified. “Downstream” is used herein to refer to a location 3′ to the DNA sequence to be amplified relative to the coding strand.

[0763] Any DNA polymerase useful for PCR can be used in the methods disclosed herein. The reagents and polymerase are commercially available from a number of sources.

[0764] Chemical structures with the ability to promote stability and/or translation efficiency may also be used. The RNA preferably has 5′ and 3′ UTRs. In one embodiment, the 5′ UTR is between one and 3000 nucleotides in length. The length of 5′ and 3′ UTR sequences to be added to the coding region can be altered by different methods, including, but not limited to, designing primers for PCR that anneal to different regions of the UTRs. Using this approach, one of ordinary skill in the art can modify the 5′ and 3′ UTR lengths required to achieve optimal translation efficiency following transfection of the transcribed RNA.

[0765] The 5′ and 3′ UTRs can be the naturally occurring, endogenous 5′ and 3′ UTRs for the nucleic acid of interest. Alternatively, UTR sequences that are not endogenous to the nucleic acid of interest can be added by incorporating the UTR sequences into the forward and reverse primers or by any other modifications of the template. The use of UTR sequences that are not endogenous to the nucleic acid of interest can be useful for modifying the stability and/or translation efficiency of the RNA. For example, it is known that AU-rich elements in 3′ UTR sequences can decrease the stability of mRNA. Therefore, 3′ UTRs can be selected or designed to increase the stability of the transcribed RNA based on properties of UTRs that are well known in the art.

[0766] In one embodiment, the 5′ UTR can contain the Kozak sequence of the endogenous nucleic acid. Alternatively, when a 5′ UTR that is not endogenous to the nucleic acid of interest is being added by PCR as described above, a consensus Kozak sequence can be redesigned by adding the 5′ UTR sequence. Kozak sequences can increase the efficiency of translation of some RNA transcripts, but does not appear to be required for all RNAs to enable efficient translation. The requirement for Kozak sequences for many mRNAs is known in the art. In other embodiments the 5′ UTR can be 5′UTR of an RNA virus whose RNA genome is stable in cells. In other embodiments various nucleotide analogues can be used in the 3′ or 5′ UTR to impede exonuclease degradation of the mRNA.

[0767] To enable synthesis of RNA from a DNA template without the need for gene cloning, a promoter of transcription should be attached to the DNA template upstream of the sequence to be transcribed. When a sequence that functions as a promoter for an RNA polymerase is added to the 5′ end of the forward primer, the RNA polymerase promoter becomes incorporated into the PCR product upstream of the open reading frame that is to be transcribed. In one preferred embodiment, the promoter is a T7 polymerase promoter, as described elsewhere herein. Other useful promoters include, but are not limited to, T3 and SP6 RNA polymerase promoters. Consensus nucleotide sequences for T7, T3 and SP6 promoters are known in the art.

[0768] In a preferred embodiment, the mRNA has both a cap on the 5′ end and a 3′ poly(A) tail which determine ribosome binding, initiation of translation and stability mRNA in the cell. On a circular DNA template, for instance, plasmid DNA, RNA polymerase produces a long concatameric product which is not suitable for expression in eukaryotic cells. The transcription of plasmid DNA linearized at the end of the 3′ UTR results in normal sized mRNA which is not effective in eukaryotic transfection even if it is polyadenylated after transcription.

[0769] On a linear DNA template, phage T7 RNA polymerase can extend the 3′ end of the transcript beyond the last base of the template (Schenbom and Mierendorf, Nuc Acids Res., 13:6223-36 (1985); Nacheva and Berzal-Herranz, Eur. J. Biochem., 270:1485-65 (2003).

[0770] The conventional method of integration of polyA/T stretches into a DNA template is molecular cloning. However polyA/T sequence integrated into plasmid DNA can cause plasmid instability, which is why plasmid DNA templates obtained from bacterial cells are often highly contaminated with deletions and other aberrations. This makes cloning procedures not only laborious and time consuming but often not reliable. That is why a method which allows construction of DNA templates with polyA/T 3′ stretch without cloning highly desirable.

[0771] The polyA/T segment of the transcriptional DNA template can be produced during PCR by using a reverse primer containing a polyT tail, such as 100T tail (SEQ ID NO: 35) (size can be 50-5000 T (SEQ ID NO: 36)), or after PCR by any other method, including, but not limited to, DNA ligation or in vitro recombination. Poly(A) tails also provide stability to RNAs and reduce their degradation. Generally, the length of a poly(A) tail positively correlates with the stability of the transcribed RNA. In one embodiment, the poly(A) tail is between 100 and 5000 adenosines (SEQ ID NO: 37).

[0772] Poly(A) tails of RNAs can be further extended following in vitro transcription with the use of a poly(A) polymerase, such as E. coli polyA polymerase (E-PAP). In one embodiment, increasing the length of a poly(A) tail from 100 nucleotides to between 300 and 400 nucleotides (SEQ ID NO: 38) results in about a two-fold increase in the translation efficiency of the RNA. Additionally, the attachment of different chemical groups to the 3′ end can increase mRNA stability. Such attachment can contain modified/artificial nucleotides, aptamers and other compounds. For example, ATP analogs can be incorporated into the poly(A) tail using poly(A) polymerase. ATP analogs can further increase the stability of the RNA.

[0773] 5′ caps on also provide stability to RNA molecules. In a preferred embodiment, RNAs produced by the methods disclosed herein include a 5′ cap. The 5′ cap is provided using techniques known in the art and described herein (Cougot, et al., Trends in Biochem. Sci., 29:436-444 (2001); Stepinski, et al., RNA, 7:1468-95 (2001); Elango, et al., Biochim. Biophys. Res. Commun., 330:958-966 (2005)).

[0774] The RNAs produced by the methods disclosed herein can also contain an internal ribosome entry site (IRES) sequence. The IRES sequence may be any viral, chromosomal or artificially designed sequence which initiates cap-independent ribosome binding to mRNA and facilitates the initiation of translation. Any solutes suitable for cell electroporation, which can contain factors facilitating cellular permeability and viability such as sugars, peptides, lipids, proteins, antioxidants, and surfactants can be included.

[0775] RNA can be introduced into target cells using any of a number of different methods, for instance, commercially available methods which include, but are not limited to, electroporation (Amaxa Nucleofector-II (Amaxa Biosystems, Cologne, Germany)), (ECM 830 (BTX) (Harvard Instruments, Boston, Mass.) or the Gene Pulser II (BioRad, Denver, Colo.), Multiporator (Eppendort, Hamburg Germany), cationic liposome mediated transfection using lipofection, polymer encapsulation, peptide mediated transfection, or biolistic particle delivery systems such as “gene guns” (see, for example, Nishikawa, et al. Hum Gene Ther., 12(8):861-70 (2001).

### Non-Viral Delivery Methods

[0776] In some aspects, non-viral methods can be used to deliver a nucleic acid encoding a CAR described herein into a cell or tissue or a subject.

[0777] In some embodiments, the non-viral method includes the use of a transposon (also called a transposable element). In some embodiments, a transposon is a piece of DNA that can insert itself at a location in a genome, for example, a piece of DNA that is capable of self-replicating and inserting its copy into a genome, or a piece of DNA that can be spliced out of a longer nucleic acid and inserted into another place in a genome. For example, a transposon comprises a DNA sequence made up of inverted repeats flanking genes for transposition.

[0778] Exemplary methods of nucleic acid delivery using a transposon include a Sleeping Beauty transposon system (SBTS) and a piggyBac (PB) transposon system. See, e.g., Aronovich et al. Hum. Mol. Genet. 20.R1(2011):R14-20; Singh et al. Cancer Res. 15(2008):2961-2971; Huang et al. Mol. Ther. 16(2008):580-589; Grabundzija et al. Mol. Ther. 18(2010):1200-1209; Kebriaei et al. Blood. 122.21(2013):166; Williams. Molecular Therapy 16.9(2008):1515-16; Bell et al. Nat. Protoc. 2.12(2007):3153-65; and Ding et al. Cell. 122.3(2005):473-83, all of which are incorporated herein by reference.

[0779] The SBTS includes two components: 1) a transposon containing a transgene and 2) a source of transposase enzyme. The transposase can transpose the transposon from a carrier plasmid (or other donor DNA) to a target DNA, such as a host cell chromosome/genome. For example, the transposase binds to the carrier plasmid/donor DNA, cuts the transposon (including transgene(s)) out of the plasmid, and inserts it into the genome of the host cell. See, e.g., Aronovich et al. supra.

[0780] Exemplary transposons include a pT2-based transposon. See, e.g., Grabundzija et al. Nucleic Acids Res. 41.3(2013):1829-47; and Singh et al. Cancer Res. 68.8(2008): 2961-2971, all of which are incorporated herein by reference. Exemplary transposases include a Tc1/mariner-type transposase, e.g., the SB10 transposase or the SB11 transposase (a hyperactive transposase which can be expressed, e.g., from a cytomegalovirus promoter). See, e.g., Aronovich et al.; Kebriaei et al.; and Grabundzija et al., all of which are incorporated herein by reference.

[0781] Use of the SBTS permits efficient integration and expression of a transgene, e.g., a nucleic acid encoding a CAR described herein. Provided herein are methods of generating a cell, e.g., T cell or NK cell, that stably expresses a CAR described herein, e.g., using a transposon system such as SBTS.

[0782] In accordance with methods described herein, in some embodiments, one or more nucleic acids, e.g., plasmids, containing the SBTS components are delivered to a cell (e.g., T or NK cell). For example, the nucleic acid(s) are delivered by standard methods of nucleic acid (e.g., plasmid DNA) delivery, e.g., methods described herein, e.g., electroporation, transfection, or lipofection. In some embodiments, the nucleic acid contains a transposon comprising a transgene, e.g., a nucleic acid encoding a CAR described herein. In some embodiments, the nucleic acid contains a transposon comprising a transgene (e.g., a nucleic acid encoding a CAR described herein) as well as a nucleic acid sequence encoding a transposase enzyme. In other embodiments, a system with two nucleic acids is provided, e.g., a dual-plasmid system, e.g., where a first plasmid contains a transposon comprising a transgene, and a second plasmid contains a nucleic acid sequence encoding a transposase enzyme. For example, the first and the second nucleic acids are co-delivered into a host cell.

[0783] In some embodiments, cells, e.g., T or NK cells, are generated that express a CAR described herein by using a combination of gene insertion using the SBTS and genetic editing using a nuclease (e.g., Zinc finger nucleases (ZFNs), Transcription Activator-Like Effector Nucleases (TALENs), the CRISPR/Cas system, or engineered meganuclease re-engineered homing endonucleases).

[0784] In some embodiments, use of a non-viral method of delivery permits reprogramming of cells, e.g., T or NK cells, and direct infusion of the cells into a subject. Advantages of non-viral vectors include but are not limited to the ease and relatively low cost of producing sufficient amounts required to meet a patient population, stability during storage, and lack of immunogenicity.

### Nucleic Acid Constructs Encoding a CAR

[0785] The present invention also provides nucleic acid molecules encoding one or more CAR constructs described herein. In one aspect, the nucleic acid molecule is provided as a messenger RNA transcript. In one aspect, the nucleic acid molecule is provided as a DNA construct.

[0786] Accordingly, in one aspect, the invention pertains to a nucleic acid molecule encoding a chimeric antigen receptor (CAR), wherein the CAR comprises an antigen binding domain that binds to a tumor antigen described herein, a transmembrane domain (e.g., a transmembrane domain described herein), and an intracellular signaling domain (e.g., an intracellular signaling domain described herein) comprising a stimulatory domain, e.g., a costimulatory signaling domain (e.g., a costimulatory signaling domain described herein) and/or a primary signaling domain (e.g., a primary signaling domain described herein, e.g., a zeta chain described herein). In one embodiment, the transmembrane domain is transmembrane domain of a protein selected from the group consisting of the alpha, beta or zeta chain of the T-cell receptor, CD28, CD3 epsilon, CD45, CD4, CD5, CD8, CD9, CD16, CD22, CD33, CD37, CD64, CD80, CD86, CD134, CD137 and CD154. In some embodiments, a transmembrane domain may include at least the transmembrane region(s) of, e.g., KIRDS2, OX40, CD2, CD27, LFA-1 (CD11a, CD18), ICOS (CD278), 4-1BB (CD137), GITR, CD40, BAFFR, HVEM (LIGHTR), SLAMF7, NKp80 (KLRF1), NKp44, NKp30, NKp46, CD160, CD19, IL2R beta, IL2R gamma, IL7R α, ITGA1, VLA1, CD49a, ITGA4, IA4, CD49D, ITGA6, VLA-6, CD49f, ITGAD, CD11d, ITGAE, CD103, ITGAL, CD11a, LFA-1, ITGAM, CD11b, ITGAX, CD11c, ITGB1, CD29, ITGB2, CD18, LFA-1, ITGB7, NKG2D, NKG2C, TNFR2, DNAM1 (CD226), SLAMF4 (CD244, 2B4), CD84, CD96 (Tactile), CEACAM1, CRTAM, Ly9 (CD229), CD160 (BY55), PSGL1, CD100 (SEMA4D), SLAMF6 (NTB-A, Ly108), SLAM (SLAMF1, CD150, IPO-3), BLAME (SLAMF8), SELPLG (CD162), LTBR, PAG/Cbp, or a functional variant thereof.

[0787] In one embodiment, the transmembrane domain comprises a sequence of SEQ ID NO: 12, or a sequence with 95-99% identity thereof. In one embodiment, the antigen binding domain is connected to the transmembrane domain by a hinge region, e.g., a hinge described herein. In one embodiment, the hinge region comprises SEQ ID NO:403 or SEQ ID NO:405 or SEQ ID NO:407 or SEQ ID NO:10, or a sequence with 95-99% identity thereof. In one embodiment, the isolated nucleic acid molecule further comprises a sequence encoding a costimulatory domain. In one embodiment, the costimulatory domain is a functional signaling domain of a protein selected from the group consisting of OX40, CD27, CD28, CDS, ICAM-1, LFA-1 (CD11a/CD18), ICOS (CD278), and 4-1BB (CD137). Further examples of such costimulatory molecules include CDS, ICAM-1, GITR, BAFFR, HVEM (LIGHTR), SLAMF7, NKp80 (KLRF1), NKp44, NKp30, NKp46, CD160, CD19, CD4, CD8alpha, CD8beta, IL2R beta, IL2R gamma, IL7R alpha, ITGA4, VLA1, CD49a, ITGA4, IA4, CD49D, ITGA6, VLA-6, CD49f, ITGAD, CD11d, ITGAE, CD103, ITGAL, CD11a, LFA-1, ITGAM, CD11b, ITGAX, CD11c, ITGB1, CD29, ITGB2, CD18, LFA-1, ITGB7, NKG2D, NKG2C, TNFR2, TRANCE/RANKL, DNAM1 (CD226), SLAMF4 (CD244, 2B4), CD84, CD96 (Tactile), CEACAM1, CRTAM, Ly9 (CD229), CD160 (BY55), PSGL1, CD100 (SEMA4D), CD69, SLAMF6 (NTB-A, Ly108), SLAM (SLAMF1, CD150, IPO-3), BLAME (SLAMF8), SELPLG (CD162), LTBR, LAT, GADS, SLP-76, and PAG/Cbp, or a functional variant thereof. In one embodiment, the costimulatory domain comprises a sequence of any one of SEQ ID NOs:14, 16, 427-430, or 5, or a sequence with 95-99% identity thereof. In one embodiment, the intracellular signaling domain comprises a functional signaling domain of CD28 and a functional signaling domain of CD3 zeta. In one embodiment, the intracellular signaling domain comprises the sequence of any one of SEQ ID NOs: 427-430 and 5, or a sequence with 95-99% identity thereof, and the sequence of SEQ ID NO: 18 or SEQ ID NO:20, or a sequence with 95-99% identity thereof, wherein the sequences comprising the intracellular signaling domain are expressed in the same frame and as a single polypeptide chain.

[0788] In another aspect, the invention pertains to an isolated nucleic acid molecule encoding a CAR construct comprising a leader sequence of SEQ ID NO: 401, a scFv domain as described herein, a hinge region of SEQ ID NO:403 or SEQ ID NO:405 or SEQ ID NO:407 or SEQ ID NO:10 (or a sequence with 95-99% identity thereof), a transmembrane domain having a sequence of SEQ ID NO: 12 (or a sequence with 95-99% identity thereof), a CD28 costimulatory domain having a sequence selected from SEQ ID NOs: 427-430 and 5 (or a sequence with 95-99% identity thereof), and a CD3 zeta stimulatory domain having a sequence of SEQ ID NO:18 or SEQ ID NO:20 (or a sequence with 95-99% identity thereof).

[0789] In another aspect, the invention pertains to a nucleic acid molecule encoding a chimeric antigen receptor (CAR) molecule that comprises an antigen binding domain, a transmembrane domain, and an intracellular signaling domain comprising a stimulatory domain, and wherein said antigen binding domain binds to a tumor antigen selected from a group consisting of: CD19, CD123, CD22, CD30, CD171, CS-1, CLL-1 (CLECL1), CD33, EGFRvIII, GD2, GD3, BCMA, Tn Ag, PSMA, ROR1, FLT3, FAP, TAG72, CD38, CD44v6, CEA, EPCAM, B7H3, KIT, IL-13Ra2, Mesothelin, IL-11Ra, PSCA, VEGFR2, LewisY, CD24, PDGFR-beta, SSEA-4, CD20, Folate receptor alpha, ERBB2 (Her2/neu), MUC1, EGFR, NCAM, Prostase, PRSS21, PAP, ELF2M, Ephrin B2, IGF-I receptor, CAIX, LMP2, gp100, bcr-abl, tyrosinase, EphA2, Fucosyl GM1, sLe, GM3, TGS5, HMWMAA, o-acetyl-GD2, Folate receptor beta, TEM1/CD248, TEM7R, CLDN6, TSHR, GPRC5D, CXORF61, CD97, CD179a, ALK, Polysialic acid, PLAC1, GloboH, NY—BR-1, UPK2, HAVCR1, ADRB3, PANX3, GPR20, LY6K, OR51E2, TARP, WT1, NY-ESO-1, LAGE-1a, MAGE-A1, legumain, HPV E6,E7, MAGE A1, ETV6-AML, sperm protein 17, XAGE1, Tie 2, MAD-CT-1, MAD-CT-2, Fos-related antigen 1, p53, p53 mutant, prostein, survivin and telomerase, PCTA-1/Galectin 8, MelanA/MART1, Ras mutant, hTERT, sarcoma translocation breakpoints, ML-IAP, ERG (TMPRSS2 ETS fusion gene), NA17, PAX3, Androgen receptor, Cyclin B1, MYCN, RhoC, TRP-2, CYP1B1, BORIS, SART3, PAX5, OY-TES1, LCK, AKAP-4, SSX2, RAGE-1, human telomerase reverse transcriptase, RU1, RU2, intestinal carboxyl esterase, mut hsp70-2, CD79a, CD79b, CD72, LAIR1, FCAR, LILRA2, CD300LF, CLEC12A, BST2, EMR2, LY75, GPC3, FCRL5, and IGLL1.

[0790] In one embodiment, the encoded CAR molecule further comprises a sequence encoding a costimulatory domain. In one embodiment, the costimulatory domain is a functional signaling domain of a protein selected from the group consisting of OX40, CD27, CD28, CDS, ICAM-1, LFA-1 (CD11a/CD18) and 4-1BB (CD137), or a functional variant thereof. In one embodiment, the costimulatory domain comprises a sequence selected from SEQ ID NOs: 14, 16, 427-430, or 5. In one embodiment, the transmembrane domain is a transmembrane domain of a protein selected from the group consisting of the alpha, beta or zeta chain of the T-cell receptor, CD28, CD3 epsilon, CD45, CD4, CD5, CD8, CD9, CD16, CD22, CD33, CD37, CD64, CD80, CD86, CD134, CD137 and CD154, or a functional variant thereof. In one embodiment, the transmembrane domain comprises a sequence of SEQ ID NO:12. In one embodiment, the intracellular signaling domain comprises a functional signaling domain of CD28 and a functional signaling domain of zeta. In one embodiment, the intracellular signaling domain comprises a sequence selected from SEQ ID NOs: 427-430 and 5 and the sequence of SEQ ID NO: 18, wherein the sequences comprising the intracellular signaling domain are expressed in the same frame and as a single polypeptide chain. In one embodiment, the anti-a cancer associated antigen as described herein binding domain is connected to the transmembrane domain by a hinge region. In one embodiment, the hinge region comprises SEQ ID NO:403. In one embodiment, the hinge region comprises SEQ ID NO:405 or SEQ ID NO:407 or SEQ ID NO:10.

[0791] The nucleic acid sequences coding for the desired molecules can be obtained using recombinant methods known in the art, such as, for example by screening libraries from cells expressing the gene, by deriving the gene from a vector known to include the same, or by isolating directly from cells and tissues containing the same, using standard techniques. Alternatively, the gene of interest can be produced synthetically, rather than cloned.

[0792] The present invention also provides vectors in which a DNA of the present invention is inserted. Vectors derived from retroviruses such as the lentivirus are suitable tools to achieve long-term gene transfer since they allow long-term, stable integration of a transgene and its propagation in daughter cells. Lentiviral vectors have the added advantage over vectors derived from onco-retroviruses such as murine leukemia viruses in that they can transduce non-proliferating cells, such as hepatocytes. They also have the added advantage of low immunogenicity. A retroviral vector may also be, e.g., a gammaretroviral vector. A gammaretroviral vector may include, e.g., a promoter, a packaging signal (W), a primer binding site (PBS), one or more (e.g., two) long terminal repeats (LTR), and a transgene of interest, e.g., a gene encoding a CAR. A gammaretroviral vector may lack viral structural gens such as gag, pol, and env. Exemplary gammaretroviral vectors include Murine Leukemia Virus (MLV), Spleen-Focus Forming Virus (SFFV), and Myeloproliferative Sarcoma Virus (MPSV), and vectors derived therefrom. Other gammaretroviral vectors are described, e.g., in Tobias Maetzig et al., “Gammaretroviral Vectors: Biology, Technology and Application” Viruses. 2011 June; 3(6): 677-713.

[0793] In another embodiment, the vector comprising the nucleic acid encoding the desired CAR of the invention is an adenoviral vector (A5/35). In another embodiment, the expression of nucleic acids encoding CARs can be accomplished using of transposons such as sleeping beauty, crisper, CAS9, and zinc finger nucleases. See below June et al. 2009 Nature Reviews Immunology 9.10: 704-716, is incorporated herein by reference.

[0794] In brief summary, the expression of natural or synthetic nucleic acids encoding CARs is typically achieved by operably linking a nucleic acid encoding the CAR polypeptide or portions thereof to a promoter, and incorporating the construct into an expression vector. The vectors can be suitable for replication and integration eukaryotes. Typical cloning vectors contain transcription and translation terminators, initiation sequences, and promoters useful for regulation of the expression of the desired nucleic acid sequence.

[0795] The expression constructs of the present invention may also be used for nucleic acid immunization and gene therapy, using standard gene delivery protocols. Methods for gene delivery are known in the art. See, e.g., U.S. Pat. Nos. 5,399,346, 5,580,859, 5,589,466, incorporated by reference herein in their entireties. In another embodiment, the invention provides a gene therapy vector.

[0796] The nucleic acid can be cloned into a number of types of vectors. For example, the nucleic acid can be cloned into a vector including, but not limited to a plasmid, a phagemid, a phage derivative, an animal virus, and a cosmid. Vectors of particular interest include expression vectors, replication vectors, probe generation vectors, and sequencing vectors.

[0797] Further, the expression vector may be provided to a cell in the form of a viral vector. Viral vector technology is well known in the art and is described, for example, in Sambrook et al., 2012, MOLECULAR CLONING: A LABORATORY MANUAL, volumes 1-4, Cold Spring Harbor Press, NY), and in other virology and molecular biology manuals. Viruses, which are useful as vectors include, but are not limited to, retroviruses, adenoviruses, adeno-associated viruses, herpes viruses, and lentiviruses. In general, a suitable vector contains an origin of replication functional in at least one organism, a promoter sequence, convenient restriction endonuclease sites, and one or more selectable markers, (e.g., WO 01/96584; WO 01/29058; and U.S. Pat. No. 6,326,193).

[0798] A number of viral based systems have been developed for gene transfer into mammalian cells. For example, retroviruses provide a convenient platform for gene delivery systems. A selected gene can be inserted into a vector and packaged in retroviral particles using techniques known in the art. The recombinant virus can then be isolated and delivered to cells of the subject either in vivo or ex vivo. A number of retroviral systems are known in the art. In some embodiments, adenovirus vectors are used. A number of adenovirus vectors are known in the art. In one embodiment, lentivirus vectors are used.

[0799] Additional promoter elements, e.g., enhancers, regulate the frequency of transcriptional initiation. Typically, these are located in the region 30-110 bp upstream of the start site, although a number of promoters have been shown to contain functional elements downstream of the start site as well. The spacing between promoter elements frequently is flexible, so that promoter function is preserved when elements are inverted or moved relative to one another. In the thymidine kinase (tk) promoter, the spacing between promoter elements can be increased to 50 bp apart before activity begins to decline. Depending on the promoter, it appears that individual elements can function either cooperatively or independently to activate transcription. Exemplary promoters include the CMV IE gene, EF-1α, ubiquitin C, or phosphoglycerokinase (PGK) promoters.

[0800] An example of a promoter that is capable of expressing a CAR encoding nucleic acid molecule in a mammalian T cell is the EF1a promoter. The native EF1a promoter drives expression of the alpha subunit of the elongation factor-1 complex, which is responsible for the enzymatic delivery of aminoacyl tRNAs to the ribosome. The EF1a promoter has been extensively used in mammalian expression plasmids and has been shown to be effective in driving CAR expression from nucleic acid molecules cloned into a lentiviral vector. See, e.g., Milone et al., Mol. Ther. 17(8): 1453-1464 (2009). In one aspect, the EF1a promoter comprises the sequence provided as SEQ ID NO:400.

[0801] Another example of a promoter is the immediate early cytomegalovirus (CMV) promoter sequence. This promoter sequence is a strong constitutive promoter sequence capable of driving high levels of expression of any polynucleotide sequence operatively linked thereto. However, other constitutive promoter sequences may also be used, including, but not limited to the simian virus 40 (SV40) early promoter, mouse mammary tumor virus (MMTV), human immunodeficiency virus (HIV) long terminal repeat (LTR) promoter, MoMuLV promoter, an avian leukemia virus promoter, an Epstein-Barr virus immediate early promoter, a Rous sarcoma virus promoter, as well as human gene promoters such as, but not limited to, the actin promoter, the myosin promoter, the elongation factor-1α promoter, the hemoglobin promoter, and the creatine kinase promoter. Further, the invention should not be limited to the use of constitutive promoters. Inducible promoters are also contemplated as part of the invention. The use of an inducible promoter provides a molecular switch capable of turning on expression of the polynucleotide sequence which it is operatively linked when such expression is desired, or turning off the expression when expression is not desired. Examples of inducible promoters include, but are not limited to a metallothionine promoter, a glucocorticoid promoter, a progesterone promoter, and a tetracycline promoter.

[0802] A vector may also include, e.g., a signal sequence to facilitate secretion, a polyadenylation signal and transcription terminator (e.g., from Bovine Growth Hormone (BGH) gene), an element allowing episomal replication and replication in prokaryotes (e.g. SV40 origin and ColE1 or others known in the art) and/or elements to allow selection (e.g., ampicillin resistance gene and/or zeocin marker).

[0803] In order to assess the expression of a CAR polypeptide or portions thereof, the expression vector to be introduced into a cell can also contain either a selectable marker gene or a reporter gene or both to facilitate identification and selection of expressing cells from the population of cells sought to be transfected or infected through viral vectors. In other aspects, the selectable marker may be carried on a separate piece of DNA and used in a co-transfection procedure. Both selectable markers and reporter genes may be flanked with appropriate regulatory sequences to enable expression in the host cells. Useful selectable markers include, for example, antibiotic-resistance genes, such as neo and the like.

[0804] Reporter genes are used for identifying potentially transfected cells and for evaluating the functionality of regulatory sequences. In general, a reporter gene is a gene that is not present in or expressed by the recipient organism or tissue and that encodes a polypeptide whose expression is manifested by some easily detectable property, e.g., enzymatic activity. Expression of the reporter gene is assayed at a suitable time after the DNA has been introduced into the recipient cells. Suitable reporter genes may include genes encoding luciferase, beta-galactosidase, chloramphenicol acetyl transferase, secreted alkaline phosphatase, or the green fluorescent protein gene (e.g., Ui-Tei et al., 2000 FEBS Letters 479: 79-82). Suitable expression systems are well known and may be prepared using known techniques or obtained commercially. In general, the construct with the minimal 5′ flanking region showing the highest level of expression of reporter gene is identified as the promoter. Such promoter regions may be linked to a reporter gene and used to evaluate agents for the ability to modulate promoter-driven transcription.

[0805] Methods of introducing and expressing genes into a cell are known in the art. In the context of an expression vector, the vector can be readily introduced into a host cell, e.g., mammalian, bacterial, yeast, or insect cell by any method in the art. For example, the expression vector can be transferred into a host cell by physical, chemical, or biological means.

[0806] Physical methods for introducing a polynucleotide into a host cell include calcium phosphate precipitation, lipofection, particle bombardment, microinjection, electroporation, and the like. Methods for producing cells comprising vectors and/or exogenous nucleic acids are well-known in the art. See, for example, Sambrook et al., 2012, MOLECULAR CLONING: A LABORATORY MANUAL, volumes 1-4, Cold Spring Harbor Press, NY). A preferred method for the introduction of a polynucleotide into a host cell is calcium phosphate transfection

[0807] Biological methods for introducing a polynucleotide of interest into a host cell include the use of DNA and RNA vectors. Viral vectors, and especially retroviral vectors, have become the most widely used method for inserting genes into mammalian, e.g., human cells. Other viral vectors can be derived from lentivirus, poxviruses, herpes simplex virus I, adenoviruses and adeno-associated viruses, and the like. See, for example, U.S. Pat. Nos. 5,350,674 and 5,585,362.

[0808] Chemical means for introducing a polynucleotide into a host cell include colloidal dispersion systems, such as macromolecule complexes, nanocapsules, microspheres, beads, and lipid-based systems including oil-in-water emulsions, micelles, mixed micelles, and liposomes. An exemplary colloidal system for use as a delivery vehicle in vitro and in vivo is a liposome (e.g., an artificial membrane vesicle). Other methods of state-of-the-art targeted delivery of nucleic acids are available, such as delivery of polynucleotides with targeted nanoparticles or other suitable sub-micron sized delivery system.

[0809] In the case where a non-viral delivery system is utilized, an exemplary delivery vehicle is a liposome. The use of lipid formulations is contemplated for the introduction of the nucleic acids into a host cell (in vitro, ex vivo or in vivo). In another aspect, the nucleic acid may be associated with a lipid. The nucleic acid associated with a lipid may be encapsulated in the aqueous interior of a liposome, interspersed within the lipid bilayer of a liposome, attached to a liposome via a linking molecule that is associated with both the liposome and the oligonucleotide, entrapped in a liposome, complexed with a liposome, dispersed in a solution containing a lipid, mixed with a lipid, combined with a lipid, contained as a suspension in a lipid, contained or complexed with a micelle, or otherwise associated with a lipid. Lipid, lipid/DNA or lipid/expression vector associated compositions are not limited to any particular structure in solution. For example, they may be present in a bilayer structure, as micelles, or with a “collapsed” structure. They may also simply be interspersed in a solution, possibly forming aggregates that are not uniform in size or shape. Lipids are fatty substances which may be naturally occurring or synthetic lipids. For example, lipids include the fatty droplets that naturally occur in the cytoplasm as well as the class of compounds which contain long-chain aliphatic hydrocarbons and their derivatives, such as fatty acids, alcohols, amines, amino alcohols, and aldehydes.

[0810] Lipids suitable for use can be obtained from commercial sources. For example, dimyristyl phosphatidylcholine (“DMPC”) can be obtained from Sigma, St. Louis, MO; dicetyl phosphate (“DCP”) can be obtained from K & K Laboratories (Plainview, NY); cholesterol (“Choi”) can be obtained from Calbiochem-Behring; dimyristyl phosphatidylglycerol (“DMPG”) and other lipids may be obtained from Avanti Polar Lipids, Inc. (Birmingham, AL.). Stock solutions of lipids in chloroform or chloroform/methanol can be stored at about −20° C. Chloroform is used as the only solvent since it is more readily evaporated than methanol. “Liposome” is a generic term encompassing a variety of single and multilamellar lipid vehicles formed by the generation of enclosed lipid bilayers or aggregates. Liposomes can be characterized as having vesicular structures with a phospholipid bilayer membrane and an inner aqueous medium. Multilamellar liposomes have multiple lipid layers separated by aqueous medium. They form spontaneously when phospholipids are suspended in an excess of aqueous solution. The lipid components undergo self-rearrangement before the formation of closed structures and entrap water and dissolved solutes between the lipid bilayers (Ghosh et al., 1991 Glycobiology 5: 505-10). However, compositions that have different structures in solution than the normal vesicular structure are also encompassed. For example, the lipids may assume a micellar structure or merely exist as nonuniform aggregates of lipid molecules. Also contemplated are lipofectamine-nucleic acid complexes.

[0811] Regardless of the method used to introduce exogenous nucleic acids into a host cell or otherwise expose a cell to the inhibitor of the present invention, in order to confirm the presence of the recombinant DNA sequence in the host cell, a variety of assays may be performed. Such assays include, for example, “molecular biological” assays well known to those of skill in the art, such as Southern and Northern blotting, RT-PCR and PCR; “biochemical” assays, such as detecting the presence or absence of a particular peptide, e.g., by immunological means (ELISAs and Western blots) or by assays described herein to identify agents falling within the scope of the invention.

[0812] The present invention further provides a vector comprising a CAR encoding nucleic acid molecule. In one aspect, a CAR vector can be directly transduced into a cell, e.g., a T cell or a NK cell. In one aspect, the vector is a cloning or expression vector, e.g., a vector including, but not limited to, one or more plasmids (e.g., expression plasmids, cloning vectors, minicircles, minivectors, double minute chromosomes), retroviral and lentiviral vector constructs. In one aspect, the vector is capable of expressing the CAR construct in mammalian immune effector cells (e.g., T cells, NK cells). In one aspect, the mammalian T cell is a human T cell. In one aspect, the mammalian NK cell is a human NK cell.

### Sources of Cells

[0813] Prior to expansion and genetic modification or other modification, a source of cells, e.g., T cells or natural killer (NK) cells, can be obtained from a subject. The term “subject” is intended to include living organisms in which an immune response can be elicited (e.g., mammals). Examples of subjects include humans, monkeys, chimpanzees, dogs, cats, mice, rats, and transgenic species thereof. T cells can be obtained from a number of sources, including peripheral blood mononuclear cells, bone marrow, lymph node tissue, cord blood, thymus tissue, tissue from a site of infection, ascites, pleural effusion, spleen tissue, and tumors.

[0814] In certain aspects of the present disclosure, immune effector cells, e.g., T cells, can be obtained from a unit of blood collected from a subject using any number of techniques known to the skilled artisan, such as Ficoll™ separation. In one preferred aspect, cells from the circulating blood of an individual are obtained by apheresis. The apheresis product typically contains lymphocytes, including T cells, monocytes, granulocytes, B cells, other nucleated white blood cells, red blood cells, and platelets. In one aspect, the cells collected by apheresis may be washed to remove the plasma fraction and, optionally, to place the cells in an appropriate buffer or media for subsequent processing steps. In one embodiment, the cells are washed with phosphate buffered saline (PBS). In an alternative embodiment, the wash solution lacks calcium and may lack magnesium or may lack many if not all divalent cations.

[0815] Initial activation steps in the absence of calcium can lead to magnified activation. As those of ordinary skill in the art would readily appreciate a washing step may be accomplished by methods known to those in the art, such as by using a semi-automated “flow-through” centrifuge (for example, the Cobe 2991 cell processor, the Baxter CytoMate, or the Haemonetics Cell Saver 5) according to the manufacturer's instructions. After washing, the cells may be resuspended in a variety of biocompatible buffers, such as, for example, Ca-free, Mg-free PBS, PlasmaLyte A, or other saline solution with or without buffer. Alternatively, the undesirable components of the apheresis sample may be removed and the cells directly resuspended in culture media.

[0816] It is recognized that the methods of the application can utilize culture media conditions comprising 5% or less, for example 2%, human AB serum, and employ known culture media conditions and compositions, for example those described in Smith et al., “Ex vivo expansion of human T cells for adoptive immunotherapy using the novel Xeno-free CTS Immune Cell Serum Replacement” Clinical & Translational Immunology (2015) 4, e31; doi:10.1038/cti.2014.31.

[0817] In one aspect, T cells are isolated from peripheral blood lymphocytes by lysing the red blood cells and depleting the monocytes, for example, by centrifugation through a PERCOLL™ gradient or by counterflow centrifugal elutriation.

[0818] The methods described herein can include, e.g., selection of a specific subpopulation of immune effector cells, e.g., T cells, that are a T regulatory cell-depleted population, CD25+ depleted cells, using, e.g., a negative selection technique, e.g., described herein. Preferably, the population of T regulatory depleted cells contains less than 30%, 25%, 20%, 15%, 10%, 5%, 4%, 3%, 2%, 1% of CD25+ cells.

[0819] In one embodiment, T regulatory cells, e.g., CD25+ T cells, are removed from the population using an anti-CD25 antibody, or fragment thereof, or a CD25-binding ligand, IL-2. In one embodiment, the anti-CD25 antibody, or fragment thereof, or CD25-binding ligand is conjugated to a substrate, e.g., a bead, or is otherwise coated on a substrate, e.g., a bead. In one embodiment, the anti-CD25 antibody, or fragment thereof, is conjugated to a substrate as described herein.

[0820] In one embodiment, the T regulatory cells, e.g., CD25+ T cells, are removed from the population using CD25 depletion reagent from Miltenyi™. In one embodiment, the ratio of cells to CD25 depletion reagent is 1e7 cells to 20 uL, or 1e7 cells to 15 uL, or 1e7 cells to 10 uL, or 1e7 cells to 5 uL, or 1e7 cells to 2.5 uL, or 1e7 cells to 1.25 uL. In one embodiment, e.g., for T regulatory cells, e.g., CD25+ depletion, greater than 500 million cells/ml is used. In a further aspect, a concentration of cells of 600, 700, 800, or 900 million cells/ml is used.

[0821] In one embodiment, the population of immune effector cells to be depleted includes about 6×10⁹ CD25+ T cells. In other aspects, the population of immune effector cells to be depleted include about 1×10⁹ to 1×10¹⁰ CD25+ T cell, and any integer value in between. In one embodiment, the resulting population T regulatory depleted cells has 2×10⁹ T regulatory cells, e.g., CD25+ cells, or less (e.g., 1×10⁹, 5×10⁸, 1×10⁸, 5×10⁷, 1×10⁷, or less CD25+ cells).

[0822] In one embodiment, the T regulatory cells, e.g., CD25+ cells, are removed from the population using the CliniMAC system with a depletion tubing set, such as, e.g., tubing 162-01. In one embodiment, the CliniMAC system is run on a depletion setting such as, e.g., DEPLETION2.1.

[0823] Without wishing to be bound by a particular theory, decreasing the level of negative regulators of immune cells (e.g., decreasing the number of unwanted immune cells, e.g., TREG Cells), in a subject prior to apheresis or during manufacturing of a CAR-expressing cell product can reduce the risk of subject relapse. For example, methods of depleting TREG cells are known in the art. Methods of decreasing TREG cells include, but are not limited to, cyclophosphamide, anti-GITR antibody (an anti-GITR antibody described herein), CD25-depletion, and combinations thereof.

[0824] In some embodiments, the manufacturing methods comprise reducing the number of (e.g., depleting) TREG cells prior to manufacturing of the CAR-expressing cell. For example, manufacturing methods comprise contacting the sample, e.g., the apheresis sample, with an anti-GITR antibody and/or an anti-CD25 antibody (or fragment thereof, or a CD25-binding ligand), e.g., to deplete TREG cells prior to manufacturing of the CAR-expressing cell (e.g., T cell, NK cell) product.

[0825] In an embodiment, a subject is pre-treated with one or more therapies that reduce TREG cells prior to collection of cells for CAR-expressing cell product manufacturing, thereby reducing the risk of subject relapse to CAR-expressing cell treatment. In an embodiment, methods of decreasing TREG cells include, but are not limited to, administration to the subject of one or more of cyclophosphamide, anti-GITR antibody, CD25-depletion, or a combination thereof. Administration of one or more of cyclophosphamide, anti-GITR antibody, CD25-depletion, or a combination thereof, can occur before, during or after an infusion of the CAR-expressing cell product.

[0826] In an embodiment, a subject is pre-treated with cyclophosphamide prior to collection of cells for CAR-expressing cell product manufacturing, thereby reducing the risk of subject relapse to CAR-expressing cell treatment. In an embodiment, a subject is pre-treated with an anti-GITR antibody prior to collection of cells for CAR-expressing cell product manufacturing, thereby reducing the risk of subject relapse to CAR-expressing cell treatment.

[0827] In one embodiment, the population of cells to be removed are neither the regulatory T cells or tumor cells, but cells that otherwise negatively affect the expansion and/or function of CART cells, e.g. cells expressing CD14, CD11b, CD33, CD15, or other markers expressed by potentially immune suppressive cells. In one embodiment, such cells are envisioned to be removed concurrently with regulatory T cells and/or tumor cells, or following said depletion, or in another order.

[0828] The methods described herein can include more than one selection step, e.g., more than one depletion step. Enrichment of a T cell population by negative selection can be accomplished, e.g., with a combination of antibodies directed to surface markers unique to the negatively selected cells. One method is cell sorting and/or selection via negative magnetic immunoadherence or flow cytometry that uses a cocktail of monoclonal antibodies directed to cell surface markers present on the cells negatively selected. For example, to enrich for CD4+ cells by negative selection, a monoclonal antibody cocktail can include antibodies to CD14, CD20, CD11b, CD16, HLA-DR, and CD8.

[0829] The methods described herein can further include removing cells from the population which express a tumor antigen, e.g., a tumor antigen that does not comprise CD25, e.g., CD19, CD30, CD38, CD123, CD20, CD14 or CD11b, to thereby provide a population of T regulatory depleted, e.g., CD25+ depleted, and tumor antigen depleted cells that are suitable for expression of a CAR, e.g., a CAR described herein. In one embodiment, tumor antigen expressing cells are removed simultaneously with the T regulatory, e.g., CD25+ cells. For example, an anti-CD25 antibody, or fragment thereof, and an anti-tumor antigen antibody, or fragment thereof, can be attached to the same substrate, e.g., bead, which can be used to remove the cells or an anti-CD25 antibody, or fragment thereof, or the anti-tumor antigen antibody, or fragment thereof, can be attached to separate beads, a mixture of which can be used to remove the cells. In other embodiments, the removal of T regulatory cells, e.g., CD25+ cells, and the removal of the tumor antigen expressing cells is sequential, and can occur, e.g., in either order.

[0830] Also provided are methods that include removing cells from the population which express a check point inhibitor, e.g., a check point inhibitor described herein, e.g., one or more of PD1+ cells, LAG3+ cells, and TIM3+ cells, to thereby provide a population of T regulatory depleted, e.g., CD25+ depleted cells, and check point inhibitor depleted cells, e.g., PD1+, LAG3+ and/or TIM3+ depleted cells. Exemplary check point inhibitors include B7-H1, B7-1, CD160, P1H, 2B4, PD1, TIM3, CEACAM (e.g., CEACAM-1, CEACAM-3 and/or CEACAM-5), LAG3, TIGIT, CTLA-4, BTLA and LAIR1. In one embodiment, check point inhibitor expressing cells are removed simultaneously with the T regulatory, e.g., CD25+ cells. For example, an anti-CD25 antibody, or fragment thereof, and an anti-check point inhibitor antibody, or fragment thereof, can be attached to the same bead which can be used to remove the cells, or an anti-CD25 antibody, or fragment thereof, and the anti-check point inhibitor antibody, or fragment there, can be attached to separate beads, a mixture of which can be used to remove the cells. In other embodiments, the removal of T regulatory cells, e.g., CD25+ cells, and the removal of the check point inhibitor expressing cells is sequential, and can occur, e.g., in either order.

[0831] Methods described herein can include a positive selection step. For example, T cells can isolated by incubation with anti-CD3/anti-CD28 (e.g., 3×28)-conjugated beads, such as DYNABEADS® M-450 CD3/CD28 T, for a time period sufficient for positive selection of the desired T cells. In one embodiment, the time period is about 30 minutes. In a further embodiment, the time period ranges from 30 minutes to 36 hours or longer and all integer values there between. In a further embodiment, the time period is at least 1, 2, 3, 4, 5, or 6 hours. In yet another embodiment, the time period is 10 to 24 hours, e.g., 24 hours. Longer incubation times may be used to isolate T cells in any situation where there are few T cells as compared to other cell types, such in isolating tumor infiltrating lymphocytes (TIL) from tumor tissue or from immunocompromised individuals. Further, use of longer incubation times can increase the efficiency of capture of CD8+ T cells. Thus, by simply shortening or lengthening the time T cells are allowed to bind to the CD3/CD28 beads and/or by increasing or decreasing the ratio of beads to T cells (as described further herein), subpopulations of T cells can be preferentially selected for or against at culture initiation or at other time points during the process. Additionally, by increasing or decreasing the ratio of anti-CD3 and/or anti-CD28 antibodies on the beads or other surface, subpopulations of T cells can be preferentially selected for or against at culture initiation or at other desired time points.

[0832] In one embodiment, a T cell population can be selected that expresses one or more of IFN-^{γ}, TNFα, IL-17A, IL-2, IL-3, IL-4, GM-CSF, IL-10, IL-13, granzyme B, and perform, or other appropriate molecules, e.g., other cytokines. Methods for screening for cell expression can be determined, e.g., by the methods described in PCT Publication No.: WO 2013/126712.

[0833] For isolation of a desired population of cells by positive or negative selection, the concentration of cells and surface (e.g., particles such as beads) can be varied. In certain aspects, it may be desirable to significantly decrease the volume in which beads and cells are mixed together (e.g., increase the concentration of cells), to ensure maximum contact of cells and beads. For example, in one aspect, a concentration of 10 billion cells/ml, 9 billion/ml, 8 billion/ml, 7 billion/ml, 6 billion/ml, or 5 billion/ml is used. In one aspect, a concentration of 1 billion cells/ml is used. In yet one aspect, a concentration of cells from 75, 80, 85, 90, 95, or 100 million cells/ml is used. In further aspects, concentrations of 125 or 150 million cells/ml can be used.

[0834] Using high concentrations can result in increased cell yield, cell activation, and cell expansion. Further, use of high cell concentrations allows more efficient capture of cells that may weakly express target antigens of interest, such as CD28-negative T cells, or from samples where there are many tumor cells present (e.g., leukemic blood, tumor tissue, etc.). Such populations of cells may have therapeutic value and would be desirable to obtain. For example, using high concentration of cells allows more efficient selection of CD8+ T cells that normally have weaker CD28 expression.

[0835] In a related aspect, it may be desirable to use lower concentrations of cells. By significantly diluting the mixture of T cells and surface (e.g., particles such as beads), interactions between the particles and cells is minimized. This selects for cells that express high amounts of desired antigens to be bound to the particles. For example, CD4+ T cells express higher levels of CD28 and are more efficiently captured than CD8+ T cells in dilute concentrations. In one aspect, the concentration of cells used is 5×10⁶/ml. In other aspects, the concentration used can be from about 1×10⁵/ml to 1×10⁶/ml, and any integer value in between.

[0836] In other aspects, the cells may be incubated on a rotator for varying lengths of time at varying speeds at either 2-10° C. or at room temperature.

[0837] T cells for stimulation can also be frozen after a washing step. Wishing not to be bound by theory, the freeze and subsequent thaw step provides a more uniform product by removing granulocytes and to some extent monocytes in the cell population. After the washing step that removes plasma and platelets, the cells may be suspended in a freezing solution. While many freezing solutions and parameters are known in the art and will be useful in this context, one method involves using PBS containing 20% DMSO and 8% human serum albumin, or culture media containing 10% Dextran 40 and 5% Dextrose, 20% Human Serum Albumin and 7.5% DMSO, or 31.25% Plasmalyte-A, 31.25% Dextrose 5%, 0.45% NaCl, 10% Dextran 40 and 5% Dextrose, 20% Human Serum Albumin, and 7.5% DMSO or other suitable cell freezing media containing for example, Hespan and PlasmaLyte A, the cells then are frozen to −80° C. at a rate of 1° per minute and stored in the vapor phase of a liquid nitrogen storage tank. Other methods of controlled freezing may be used as well as uncontrolled freezing immediately at −20° C. or in liquid nitrogen.

[0838] In certain aspects, cryopreserved cells are thawed and washed as described herein and allowed to rest for one hour at room temperature prior to activation using the methods of the present invention.

[0839] Also contemplated in the context of the invention is the collection of blood samples or apheresis product from a subject at a time period prior to when the expanded cells as described herein might be needed. As such, the source of the cells to be expanded can be collected at any time point necessary, and desired cells, such as T cells, isolated and frozen for later use in immune effector cell therapy for any number of diseases or conditions that would benefit from immune effector cell therapy, such as those described herein. In one aspect a blood sample or an apheresis is taken from a generally healthy subject. In certain aspects, a blood sample or an apheresis is taken from a generally healthy subject who is at risk of developing a disease, but who has not yet developed a disease, and the cells of interest are isolated and frozen for later use. In certain aspects, the T cells may be expanded, frozen, and used at a later time. In certain aspects, samples are collected from a patient shortly after diagnosis of a particular disease as described herein but prior to any treatments. In a further aspect, the cells are isolated from a blood sample or an apheresis from a subject prior to any number of relevant treatment modalities, including but not limited to treatment with agents such as natalizumab, efalizumab, antiviral agents, chemotherapy, radiation, immunosuppressive agents, such as cyclosporin, azathioprine, methotrexate, mycophenolate, and FK506, antibodies, or other immunoablative agents such as CAMPATH, anti-CD3 antibodies, cytoxan, fludarabine, cyclosporin, FK506, rapamycin, mycophenolic acid, steroids, FR901228, and irradiation.

[0840] In a further aspect of the present invention, T cells are obtained from a patient directly following treatment that leaves the subject with functional T cells. In this regard, it has been observed that following certain cancer treatments, in particular treatments with drugs that damage the immune system, shortly after treatment during the period when patients would normally be recovering from the treatment, the quality of T cells obtained may be optimal or improved for their ability to expand ex vivo. Likewise, following ex vivo manipulation using the methods described herein, these cells may be in a preferred state for enhanced engraftment and in vivo expansion. Thus, it is contemplated within the context of the present invention to collect blood cells, including T cells, dendritic cells, or other cells of the hematopoietic lineage, during this recovery phase. Further, in certain aspects, mobilization (for example, mobilization with GM-CSF) and conditioning regimens can be used to create a condition in a subject wherein repopulation, recirculation, regeneration, and/or expansion of particular cell types is favored, especially during a defined window of time following therapy. Illustrative cell types include T cells, B cells, dendritic cells, and other cells of the immune system.

[0841] In one embodiment, the immune effector cells expressing a CAR molecule, e.g., a CAR molecule described herein, are obtained from a subject that has received a low, immune enhancing dose of an mTOR inhibitor. In an embodiment, the population of immune effector cells, e.g., T cells, to be engineered to express a CAR, are harvested after a sufficient time, or after sufficient dosing of the low, immune enhancing, dose of an mTOR inhibitor, such that the level of PD1 negative immune effector cells, e.g., T cells, or the ratio of PD1 negative immune effector cells, e.g., T cells/PD1 positive immune effector cells, e.g., T cells, in the subject or harvested from the subject has been, at least transiently, increased.

[0842] In other embodiments, population of immune effector cells, e.g., T cells, which have, or will be engineered to express a CAR, can be treated ex vivo by contact with an amount of an mTOR inhibitor that increases the number of PD1 negative immune effector cells, e.g., T cells or increases the ratio of PD1 negative immune effector cells, e.g., T cells/PD1 positive immune effector cells, e.g., T cells.

[0843] In one embodiment, a T cell population is diacylglycerol kinase (DGK)-deficient. DGK-deficient cells include cells that do not express DGK RNA or protein, or have reduced or inhibited DGK activity. DGK-deficient cells can be generated by genetic approaches, e.g., administering RNA-interfering agents, e.g., siRNA, shRNA, miRNA, to reduce or prevent DGK expression. Alternatively, DGK-deficient cells can be generated by treatment with DGK inhibitors described herein.

[0844] In one embodiment, a T cell population is Ikaros-deficient. Ikaros-deficient cells include cells that do not express Ikaros RNA or protein, or have reduced or inhibited Ikaros activity, Ikaros-deficient cells can be generated by genetic approaches, e.g., administering RNA-interfering agents, e.g., siRNA, shRNA, miRNA, to reduce or prevent Ikaros expression. Alternatively, Ikaros-deficient cells can be generated by treatment with Ikaros inhibitors, e.g., lenalidomide.

[0845] In embodiments, a T cell population is DGK-deficient and Ikaros-deficient, e.g., does not express DGK and Ikaros, or has reduced or inhibited DGK and Ikaros activity. Such DGK and Ikaros-deficient cells can be generated by any of the methods described herein.

[0846] In an embodiment, the NK cells are obtained from the subject. In another embodiment, the NK cells are an NK cell line, e.g., NK-92 cell line (Conkwest).

### Allogeneic CAR

[0847] In embodiments described herein, the immune effector cell can be an allogeneic immune effector cell, e.g., T cell or NK cell. For example, the cell can be an allogeneic T cell, e.g., an allogeneic T cell lacking expression of a functional T cell receptor (TCR) and/or human leukocyte antigen (HLA), e.g., HLA class I and/or HLA class II.

[0848] A T cell lacking a functional TCR can be, e.g., engineered such that it does not express any functional TCR on its surface, engineered such that it does not express one or more subunits that comprise a functional TCR or engineered such that it produces very little functional TCR on its surface. Alternatively, the T cell can express a substantially impaired TCR, e.g., by expression of mutated or truncated forms of one or more of the subunits of the TCR. The term “substantially impaired TCR” means that this TCR will not elicit an adverse immune reaction in a host.

[0849] A T cell described herein can be, e.g., engineered such that it does not express a functional HLA on its surface. For example, a T cell described herein, can be engineered such that cell surface expression HLA, e.g., HLA class 1 and/or HLA class II, is downregulated.

[0850] In some embodiments, the T cell can lack a functional TCR and a functional HLA, e.g., HLA class I and/or HLA class II.

[0851] Modified T cells that lack expression of a functional TCR and/or HLA can be obtained by any suitable means, including a knock out or knock down of one or more subunit of TCR or HLA. For example, the T cell can include a knock down of TCR and/or HLA using siRNA, shRNA, clustered regularly interspaced short palindromic repeats (CRISPR) transcription-activator like effector nuclease (TALEN), or zinc finger endonuclease (ZFN).

[0852] In some embodiments, the allogeneic cell can be a cell which does not express or expresses at low levels an inhibitory molecule, e.g. by any method described herein. For example, the cell can be a cell that does not express or expresses at low levels an inhibitory molecule, e.g., that can decrease the ability of a CAR-expressing cell to mount an immune effector response. Examples of inhibitory molecules include PD1, PD-L1, CTLA4, TIM3, CEACAM (e.g., CEACAM-1, CEACAM-3 and/or CEACAM-5), LAG3, VISTA, BTLA, TIGIT, LAIR1, CD160, 2B4 and TGF beta. Inhibition of an inhibitory molecule, e.g., by inhibition at the DNA, RNA or protein level, can optimize a CAR-expressing cell performance. In embodiments, an inhibitory nucleic acid, e.g., an inhibitory nucleic acid, e.g., a dsRNA, e.g., an siRNA or shRNA, a clustered regularly interspaced short palindromic repeats (CRISPR), a transcription-activator like effector nuclease (TALEN), or a zinc finger endonuclease (ZFN), e.g., as described herein, can be used.

siRNA and shRNA to Inhibit TCR or HLA

[0853] In some embodiments, TCR expression and/or HLA expression can be inhibited using siRNA or shRNA that targets a nucleic acid encoding a TCR and/or HLA in a T cell.

[0854] Expression of siRNA and shRNAs in T cells can be achieved using any conventional expression system, e.g., such as a lentiviral expression system.

[0855] Exemplary shRNAs that downregulate expression of components of the TCR are described, e.g., in US Publication No.: 2012/0321667. Exemplary siRNA and shRNA that downregulate expression of HLA class I and/or HLA class II genes are described, e.g., in U.S. publication No.: US 2007/0036773.

### CRISPR to Inhibit TCR or HLA

[0856] “CRISPR” or “CRISPR to TCR and/or HLA” or “CRISPR to inhibit TCR and/or HLA” as used herein refers to a set of clustered regularly interspaced short palindromic repeats, or a system comprising such a set of repeats. “Cas”, as used herein, refers to a CRISPR-associated protein. A “CRISPR/Cas” system refers to a system derived from CRISPR and Cas which can be used to silence or mutate a TCR and/or HLA gene.

[0857] Naturally-occurring CRISPR/Cas systems are found in approximately 40% of sequenced eubacteria genomes and 90% of sequenced archaea. Grissa et al. (2007) BMC Bioinformatics 8: 172. This system is a type of prokaryotic immune system that confers resistance to foreign genetic elements such as plasmids and phages and provides a form of acquired immunity. Barrangou et al. (2007) Science 315: 1709-1712; Marragini et al. (2008) Science 322: 1843-1845.

[0858] The CRISPR/Cas system has been modified for use in gene editing (silencing, enhancing or changing specific genes) in eukaryotes such as mice or primates. Wiedenheft et al. (2012) Nature 482: 331-8. This is accomplished by introducing into the eukaryotic cell a plasmid containing a specifically designed CRISPR and one or more appropriate Cas.

[0859] The CRISPR sequence, sometimes called a CRISPR locus, comprises alternating repeats and spacers. In a naturally-occurring CRISPR, the spacers usually comprise sequences foreign to the bacterium such as a plasmid or phage sequence; in the TCR and/or HLA CRISPR/Cas system, the spacers are derived from the TCR or HLA gene sequence.

[0860] RNA from the CRISPR locus is constitutively expressed and processed by Cas proteins into small RNAs. These comprise a spacer flanked by a repeat sequence. The RNAs guide other Cas proteins to silence exogenous genetic elements at the RNA or DNA level. Horvath et al. (2010) Science 327: 167-170; Makarova et al. (2006) Biology Direct 1: 7. The spacers thus serve as templates for RNA molecules, analogously to siRNAs. Pennisi (2013) Science 341: 833-836.

[0861] As these naturally occur in many different types of bacteria, the exact arrangements of the CRISPR and structure, function and number of Cas genes and their product differ somewhat from species to species. Haft et al. (2005) PLoS Comput. Biol. 1: e60; Kunin et al. (2007) Genome Biol. 8: R61; Mojica et al. (2005) J. Mol. Evol. 60: 174-182; Bolotin et al. (2005)Microbiol. 151: 2551-2561; Pourcel et al. (2005)Microbiol. 151: 653-663; and Stern et al. (2010) Trends. Genet. 28: 335-340. For example, the Cse (Cas subtype, E. coli) proteins (e.g., CasA) form a functional complex, Cascade, that processes CRISPR RNA transcripts into spacer-repeat units that Cascade retains. Brouns et al. (2008) Science 321: 960-964. In other prokaryotes, Cas6 processes the CRISPR transcript. The CRISPR-based phage inactivation in E. coli requires Cascade and Cas3, but not Cas1 or Cas2. The Cmr (Cas RAMP module) proteins in Pyrococcus furiosus and other prokaryotes form a functional complex with small CRISPR RNAs that recognizes and cleaves complementary target RNAs. A simpler CRISPR system relies on the protein Cas9, which is a nuclease with two active cutting sites, one for each strand of the double helix. Combining Cas9 and modified CRISPR locus RNA can be used in a system for gene editing. Pennisi (2013) Science 341: 833-836.

[0862] The CRISPR/Cas system can thus be used to edit a TCR and/or HLA gene (adding or deleting a basepair), or introducing a premature stop which thus decreases expression of a TCR and/or HLA. The CRISPR/Cas system can alternatively be used like RNA interference, turning off TCR and/or HLA gene in a reversible fashion. In a mammalian cell, for example, the RNA can guide the Cas protein to a TCR and/or HLA promoter, sterically blocking RNA polymerases.

[0863] Artificial CRISPR/Cas systems can be generated which inhibit TCR and/or HLA, using technology known in the art, e.g., that described in U.S. Publication No. 20140068797, and Cong (2013) Science 339: 819-823. Other artificial CRISPR/Cas systems that are known in the art may also be generated which inhibit TCR and/or HLA, e.g., that described in Tsai (2014) Nature Biotechnol., 32:6 569-576, U.S. Pat. Nos. 8,871,445; 8,865,406; 8,795,965; 8,771,945; and 8,697,359.

TALEN to Inhibit TCR and/or HLA

[0864] “TALEN” or “TALEN to HLA and/or TCR” or “TALEN to inhibit HLA and/or TCR” refers to a transcription activator-like effector nuclease, an artificial nuclease which can be used to edit the HLA and/or TCR gene.

[0865] TALENs are produced artificially by fusing a TAL effector DNA binding domain to a DNA cleavage domain. Transcription activator-like effects (TALEs) can be engineered to bind any desired DNA sequence, including a portion of the HLA or TCR gene. By combining an engineered TALE with a DNA cleavage domain, a restriction enzyme can be produced which is specific to any desired DNA sequence, including a HLA or TCR sequence. These can then be introduced into a cell, wherein they can be used for genome editing. Boch (2011) Nature Biotech. 29: 135-6; and Boch et al. (2009) Science 326: 1509-12; Moscou et al. (2009) Science 326: 3501.

[0866] TALEs are proteins secreted by Xanthomonas bacteria. The DNA binding domain contains a repeated, highly conserved 33-34 amino acid sequence, with the exception of the 12th and 13th amino acids. These two positions are highly variable, showing a strong correlation with specific nucleotide recognition. They can thus be engineered to bind to a desired DNA sequence.

[0867] To produce a TALEN, a TALE protein is fused to a nuclease (N), which is a wild-type or mutated FokI endonuclease. Several mutations to FokI have been made for its use in TALENs; these, for example, improve cleavage specificity or activity. Cermak et al. (2011) Nucl. Acids Res. 39: e82; Miller et al. (2011) Nature Biotech. 29: 143-8; Hockemeyer et al. (2011) Nature Biotech. 29: 731-734; Wood et al. (2011) Science 333: 307; Doyon et al. (2010) Nature Methods 8: 74-79; Szczepek et al. (2007) Nature Biotech. 25: 786-793; and Guo et al. (2010) J Mol. Biol. 200: 96.

[0868] The FokI domain functions as a dimer, requiring two constructs with unique DNA binding domains for sites in the target genome with proper orientation and spacing. Both the number of amino acid residues between the TALE DNA binding domain and the FokI cleavage domain and the number of bases between the two individual TALEN binding sites appear to be important parameters for achieving high levels of activity. Miller et al. (2011) Nature Biotech. 29: 143-8.

[0869] A HLA or TCR TALEN can be used inside a cell to produce a double-stranded break (DSB). A mutation can be introduced at the break site if the repair mechanisms improperly repair the break via non-homologous end joining. For example, improper repair may introduce a frame shift mutation. Alternatively, foreign DNA can be introduced into the cell along with the TALEN; depending on the sequences of the foreign DNA and chromosomal sequence, this process can be used to correct a defect in the HLA or TCR gene or introduce such a defect into a wt HLA or TCR gene, thus decreasing expression of HLA or TCR.

[0870] TALENs specific to sequences in HLA or TCR can be constructed using any method known in the art, including various schemes using modular components. Zhang et al. (2011) Nature Biotech. 29: 149-53; Geibler et al. (2011) PLoS ONE 6: e19509.

Zinc Finger Nuclease to Inhibit HLA and/or TCR

[0871] “ZFN” or “Zinc Finger Nuclease” or “ZFN to HLA and/or TCR” or “ZFN to inhibit HLA and/or TCR” refer to a zinc finger nuclease, an artificial nuclease which can be used to edit the HLA and/or TCR gene.

[0872] Like a TALEN, a ZFN comprises a FokI nuclease domain (or derivative thereof) fused to a DNA-binding domain. In the case of a ZFN, the DNA-binding domain comprises one or more zinc fingers. Carroll et al. (2011) Genetics Society of America 188: 773-782; and Kim et al. (1996) Proc. Natl. Acad. Sci. USA 93: 1156-1160.

[0873] A zinc finger is a small protein structural motif stabilized by one or more zinc ions. A zinc finger can comprise, for example, Cys2His2, and can recognize an approximately 3-bp sequence. Various zinc fingers of known specificity can be combined to produce multi-finger polypeptides which recognize about 6, 9, 12, 15 or 18-bp sequences. Various selection and modular assembly techniques are available to generate zinc fingers (and combinations thereof) recognizing specific sequences, including phage display, yeast one-hybrid systems, bacterial one-hybrid and two-hybrid systems, and mammalian cells.

[0874] Like a TALEN, a ZFN must dimerize to cleave DNA. Thus, a pair of ZFNs are required to target non-palindromic DNA sites. The two individual ZFNs must bind opposite strands of the DNA with their nucleases properly spaced apart. Bitinaite et al. (1998) Proc. Natl. Acad. Sci. USA 95: 10570-5.

[0875] Also like a TALEN, a ZFN can create a double-stranded break in the DNA, which can create a frame-shift mutation if improperly repaired, leading to a decrease in the expression and amount of HLA and/or TCR in a cell. ZFNs can also be used with homologous recombination to mutate in the HLA or TCR gene.

[0876] ZFNs specific to sequences in HLA AND/OR TCR can be constructed using any method known in the art. See, e.g., Provasi (2011) Nature Med. 18: 807-815; Torikai (2013) Blood 122: 1341-1349; Cathomen et al. (2008) Mol. Ther. 16: 1200-7; Guo et al. (2010) J. Mol. Biol. 400: 96; U.S. Patent Publication 2011/0158957; and U.S. Patent Publication 2012/0060230.

### Telomerase Expression

[0877] While not wishing to be bound by any particular theory, in some embodiments, a therapeutic T cell has short term persistence in a patient, due to shortened telomeres in the T cell; accordingly, transfection with a telomerase gene can lengthen the telomeres of the T cell and improve persistence of the T cell in the patient. See Carl June, “Adoptive T cell therapy for cancer in the clinic”, Journal of Clinical Investigation, 117:1466-1476 (2007). Thus, in an embodiment, an immune effector cell, e.g., a T cell, ectopically expresses a telomerase subunit, e.g., the catalytic subunit of telomerase, e.g., TERT, e.g., hTERT. In some aspects, this disclosure provides a method of producing a CAR-expressing cell, comprising contacting a cell with a nucleic acid encoding a telomerase subunit, e.g., the catalytic subunit of telomerase, e.g., TERT, e.g., hTERT. The cell may be contacted with the nucleic acid before, simultaneous with, or after being contacted with a construct encoding a CAR.

[0878] In one aspect, the disclosure features a method of making a population of immune effector cells (e.g., T cells, NK cells). In an embodiment, the method comprises: providing a population of immune effector cells (e.g., T cells or NK cells), contacting the population of immune effector cells with a nucleic acid encoding a CAR; and contacting the population of immune effector cells with a nucleic acid encoding a telomerase subunit, e.g., hTERT, under conditions that allow for CAR and telomerase expression.

[0879] In an embodiment, the nucleic acid encoding the telomerase subunit is DNA. In an embodiment, the nucleic acid encoding the telomerase subunit comprises a promoter capable of driving expression of the telomerase subunit.

[0880] In an embodiment, hTERT has the amino acid sequence of GenBank Protein ID AAC51724.1 (Meyerson et al., “hEST2, the Putative Human Telomerase Catalytic Subunit Gene, Is Up-Regulated in Tumor Cells and during Immortalization” Cell Volume 90, Issue 4, 22 Aug. 1997, Pages 785-795) as follows:

(SEQ ID NO: 61)
[sequence omitted]

[0881] In an embodiment, the hTERT has a sequence at least 80%, 85%, 90%, 95%, 96\hat{ }, 97%, 98%, or 99% identical to the sequence of SEQ ID NO: 61. In an embodiment, the hTERT has a sequence of SEQ ID NO: 61. In an embodiment, the hTERT comprises a deletion (e.g., of no more than 5, 10, 15, 20, or 30 amino acids) at the N-terminus, the C-terminus, or both. In an embodiment, the hTERT comprises a transgenic amino acid sequence (e.g., of no more than 5, 10, 15, 20, or 30 amino acids) at the N-terminus, the C-terminus, or both.

In an embodiment, the hTERT is encoded by the nucleic acid sequence of GenBank Accession No. AF018167 (Meyerson et al., “hEST2, the Putative Human Telomerase Catalytic Subunit Gene, Is Up-Regulated in Tumor Cells and during Immortalization” Cell Volume 90, Issue 4, 22 Aug. 1997, Pages 785-795):

| (SEQ ID NO: 62) | |
|---|---|
| 1 | caggcagcgt ggtcctgctg cgcacgtggg aagccctggc cccggccacc cccgcgatgc |
| 61 | cgcgcgctcc ccgctgccga gccgtgcgct ccctgctgcg cagccactac cgcgaggtgc |
| 121 | tgccgctggc cacgttcgtg cggcgcctgg ggccccaggg ctggcggctg gtgcagcgcg |
| 181 | gggacccggc ggctttccgc gcgctggtgg cccagtgcct ggtgtgcgtg ccctgggacg |
| 241 | cacggccgcc ccccgccgcc ccctccttcc gccaggtgtc ctgcctgaag gagctggtgg |
| 301 | cccgagtgct gcagaggctg tgcgagcgcg gcgcgaagaa cgtgctggcc ttcggcttcg |
| 361 | cgctgctgga cggggcccgc gggggccccc ccgaggcctt caccaccagc gtgcgcagct |
| 421 | acctgcccaa cacggtgacc gacgcactgc gggggagcgg ggcgtggggg ctgctgttgc |
| 481 | gccgcgtggg cgacgacgtg ctggttcacc tgctggcacg ctgcgcgctc tttgtgctgg |
| 541 | tggctcccag ctgcgcctac caggtgtgcg ggccgccgct gtaccagctc ggcgctgcca |
| 601 | ctcaggcccg gcccccgcca cacgctagtg gaccccgaag gcgtctggga tgcgaacggg |
| 661 | cctggaacca tagcgtcagg gaggccgggg tccccctggg cctgccagcc ccgggtgcga |
| 721 | ggaggcgcgg gggcagtgcc agccgaagtc tgccgttgcc caagaggccc aggcgtggcg |
| 781 | ctgcccctga gccggagcgg acgcccgttg ggcaggggtc ctgggcccac ccgggcagga |
| 841 | cgcgtggacc gagtgaccgt ggtttctgtg tggtgtcacc tgccagaccc gccgaagaag |
| 901 | ccacctcttt ggagggtgcg ctctctggca cgcgccactc ccacccatcc gtgggccgcc |
| 961 | agcaccacgc gggcccccca tccacatcgc ggccaccacg tccctgggac acgccttgtc |
| 1021 | ccccggtgta cgccgagacc aagcacttcc tctactcctc aggcgacaag gagcagctgc |
| 1081 | ggccctcctt cctactcagc tctctgaggc ccagcctgac tggcgctcgg aggctcgtgg |
| 1141 | agaccatctt tctgggttcc aggccctgga tgccagggac tccccgcagg ttgccccgcc |
| 1201 | tgccccagcg ctactggcaa atgcggcccc tgtttctgga gctgcttggg aaccacgcgc |
| 1261 | agtgccccta cggggtgctc ctcaagacgc actgcccgct gcgagctgcg gtcaccccag |
| 1321 | cagccggtgt ctgtgcccgg gagaagcccc agggctctgt ggcggccccc gaggaggagg |
| 1381 | acacagaccc ccgtcgcctg gtgcagctgc tccgccagca cagcagcccc tggcaggtgt |
| 1441 | acggcttcgt gcgggcctgc ctgcgccggc tggtgccccc aggcctctgg ggctccaggc |
| 1501 | acaacgaacg ccgcttcctc aggaacacca agaagttcat ctccctgggg aagcatgcca |
| 1561 | agctctcgct gcaggagctg acgtggaaga tgagcgtgcg gggctgcgct tggctgcgca |
| 1621 | ggagcccagg ggttggctgt gttccggccg cagagcaccg tctgcgtgag gagatcctgg |
| 1681 | ccaagttcct gcactggctg atgagtgtgt acgtcgtcga gctgctcagg tctttctttt |
| 1741 | atgtcacgga gaccacgttt caaaagaaca ggctcttttt ctaccggaag agtgtctgga |
| 1801 | gcaagttgca aagcattgga atcagacagc acttgaagag ggtgcagctg cgggagctgt |
| 1861 | cggaagcaga ggtcaggcag catcgggaag ccaggcccgc cctgctgacg tccagactcc |
| 1921 | gcttcatccc caagcctgac gggctgcggc cgattgtgaa catggactac gtcgtgggag |
| 1981 | ccagaacgtt ccgcagagaa aagagggccg agcgtctcac ctcgagggtg aaggcactgt |
| 2041 | tcagcgtgct caactacgag cgggcgcggc gccccggcct cctgggcgcc tctgtgctgg |
| 2101 | gcctggacga tatccacagg gcctggcgca ccttcgtgct gcgtgtgcgg gcccaggacc |
| 2161 | cgccgcctga gctgtacttt gtcaaggtgg atgtgacggg cgcgtacgac accatccccc |
| 2221 | aggacaggct cacggaggtc atcgccagca tcatcaaacc ccagaacacg tactgcgtgc |
| 2281 | gtcggtatgc cgtggtccag aaggccgccc atgggcacgt ccgcaaggcc ttcaagagcc |
| 2341 | acgtctctac cttgacagac ctccagccgt acatgcgaca gttcgtggct cacctgcagg |
| 2401 | agaccagccc gctgagggat gccgtcgtca tcgagcagag ctcctccctg aatgaggcca |
| 2461 | gcagtggcct cttcgacgtc ttcctacgct tcatgtgcca ccacgccgtg cgcatcaggg |
| 2521 | gcaagtccta cgtccagtgc caggggatcc cgcagggctc catcctctcc acgctgctct |
| 2581 | gcagcctgtg ctacggcgac atggagaaca agctgtttgc ggggattcgg cgggacgggc |
| 2641 | tgctcctgcg tttggtggat gatttcttgt tggtgacacc tcacctcacc cacgcgaaaa |
| 2701 | ccttcctcag gaccctggtc cgaggtgtcc ctgagtatgg ctgcgtggtg aacttgcgga |
| 2761 | agacagtggt gaacttccct gtagaagacg aggccctggg tggcacggct tttgttcaga |
| 2821 | tgccggccca cggcctattc ccctggtgcg gcctgctgct ggatacccgg accctggagg |
| 2881 | tgcagagcga ctactccagc tatgcccgga cctccatcag agccagtctc accttcaacc |
| 2941 | gcggcttcaa ggctgggagg aacatgcgtc gcaaactctt tggggtcttg cggctgaagt |
| 3001 | gtcacagcct gtttctggat ttgcaggtga acagcctcca gacggtgtgc accaacatct |
| 3061 | acaagatcct cctgctgcag gcgtacaggt ttcacgcatg tgtgctgcag ctcccatttc |
| 3121 | atcagcaagt ttggaagaac cccacatttt tcctgcgcgt catctctgac acggcctccc |
| 3181 | tctgctactc catcctgaaa gccaagaacg cagggatgtc gctgggggcc aagggcgccg |
| 3241 | ccggccctct gccctccgag gccgtgcagt ggctgtgcca ccaagcattc ctgctcaagc |
| 3301 | tgactcgaca ccgtgtcacc tacgtgccac tcctggggtc actcaggaca gcccagacgc |
| 3361 | agctgagtcg gaagctcccg gggacgacgc tgactgccct ggaggccgca gccaacccgg |
| 3421 | cactgccctc agacttcaag accatcctgg actgatggcc acccgcccac agccaggccg |
| 3481 | agagcagaca ccagcagccc tgtcacgccg ggctctacgt cccagggagg gaggggcggc |
| 3541 | ccacacccag gcccgcaccg ctgggagtct gaggcctgag tgagtgtttg gccgaggcct |
| 3601 | gcatgtccgg ctgaaggctg agtgtccggc tgaggcctga gcgagtgtcc agccaagggc |
| 3661 | tgagtgtcca gcacacctgc cgtcttcact tccccacagg ctggcgctcg gctccacccc |
| 3721 | agggccagct tttcctcacc aggagcccgg cttccactcc ccacatagga atagtccatc |
| 3781 | cccagattcg ccattgttca cccctcgccc tgccctcctt tgccttccac ccccaccatc |
| 3841 | caggtggaga ccctgagaag gaccctggga gctctgggaa tttggagtga ccaaaggtgt |
| 3901 | gccctgtaca caggcgagga ccctgcacct ggatgggggt ccctgtgggt caaattgggg |
| 3961 | ggaggtgctg tgggagtaaa atactgaata tatgagtttt tcagttttga aaaaaaaaaa |
| 4021 | aaaaaaa |

[0882] In an embodiment, the hTERT is encoded by a nucleic acid having a sequence at least 80%, 85%, 90%, 95%, 96, 97%, 98%, or 99% identical to the sequence of SEQ ID NO: 62. In an embodiment, the hTERT is encoded by a nucleic acid of SEQ ID NO: 62.

### Activation and Expansion of Immune Effector Cells (e.g., T Cells)

[0883] Immune effector cells such as T cells may be activated and expanded generally using methods as described, for example, in U.S. Pat. Nos. 6,352,694; 6,534,055; 6,905,680; 6,692,964; 5,858,358; 6,887,466; 6,905,681; 7,144,575; 7,067,318; 7,172,869; 7,232,566; 7,175,843; 5,883,223; 6,905,874; 6,797,514; 6,867,041; and U.S. Patent Application Publication No. 20060121005.

[0884] As demonstrated by the data disclosed herein, expanding the T cells by the methods disclosed herein can multiply the cells by about 10 fold, 20 fold, 30 fold, 40 fold, 50 fold, 60 fold, 70 fold, 80 fold, 90 fold, 100 fold, 200 fold, 300 fold, 400 fold, 500 fold, 600 fold, 700 fold, 800 fold, 900 fold, 1000 fold, 2000 fold, 3000 fold, 4000 fold, 5000 fold, 6000 fold, 7000 fold, 8000 fold, 9000 fold, 10,000 fold, 100,000 fold, 1,000,000 fold, 10,000,000 fold, or greater, and any and all whole or partial integers therebetween. In one embodiment, the T cells expand in the range of about 20 fold to about 50 fold.

[0885] Generally, a population of immune effector cells e.g., T regulatory cell depleted cells, may be expanded by contact with a surface having attached thereto an agent that stimulates a CD3/TCR complex associated signal and a ligand that stimulates a costimulatory molecule on the surface of the T cells. In particular, T cell populations may be stimulated as described herein, such as by contact with an anti-CD3 antibody, or antigen-binding fragment thereof, or an anti-CD2 antibody immobilized on a surface, or by contact with a protein kinase C activator (e.g., bryostatin) in conjunction with a calcium ionophore. For co-stimulation of an accessory molecule on the surface of the T cells, a ligand that binds the accessory molecule is used. For example, a population of T cells can be contacted with an anti-CD3 antibody and an anti-CD28 antibody, under conditions appropriate for stimulating proliferation of the T cells. To stimulate proliferation of either CD4+ T cells or CD8+ T cells, an anti-CD3 antibody and an anti-CD28 antibody can be used. Examples of an anti-CD28 antibody include 9.3, B-T3, XR-CD28 (Diaclone, Besangon, France) can be used as can other methods commonly known in the art (Berg et al., Transplant Proc. 30(8):3975-3977, 1998; Haanen et al., J. Exp. Med. 190(9):13191328, 1999; Garland et al., J. Immunol Meth. 227(1-2):53-63, 1999).

[0886] In certain aspects, the primary stimulatory signal and the costimulatory signal for the T cell may be provided by different protocols. For example, the agents providing each signal may be in solution or coupled to a surface. When coupled to a surface, the agents may be coupled to the same surface (i.e., in “cis” formation) or to separate surfaces (i.e., in “trans” formation). Alternatively, one agent may be coupled to a surface and the other agent in solution. In one aspect, the agent providing the costimulatory signal is bound to a cell surface and the agent providing the primary activation signal is in solution or coupled to a surface. In certain aspects, both agents can be in solution. In one aspect, the agents may be in soluble form, and then cross-linked to a surface, such as a cell expressing Fc receptors or an antibody or other binding agent which will bind to the agents. In this regard, see for example, U.S. Patent Application Publication Nos. 20040101519 and 20060034810 for artificial antigen presenting cells (aAPCs) that are contemplated for use in activating and expanding T cells in the present invention.

[0887] In one aspect, the two agents are immobilized on beads, either on the same bead, i.e., “cis,” or to separate beads, i.e., “trans.” By way of example, the agent providing the primary activation signal is an anti-CD3 antibody or an antigen-binding fragment thereof and the agent providing the costimulatory signal is an anti-CD28 antibody or antigen-binding fragment thereof; and both agents are co-immobilized to the same bead in equivalent molecular amounts. In one aspect, a 1:1 ratio of each antibody bound to the beads for CD4+ T cell expansion and T cell growth is used. In certain aspects of the present invention, a ratio of anti CD3:CD28 antibodies bound to the beads is used such that an increase in T cell expansion is observed as compared to the expansion observed using a ratio of 1:1. In one particular aspect an increase of from about 1 to about 3 fold is observed as compared to the expansion observed using a ratio of 1:1. In one aspect, the ratio of CD3:CD28 antibody bound to the beads ranges from 100:1 to 1:100 and all integer values there between. In one aspect, more anti-CD28 antibody is bound to the particles than anti-CD3 antibody, i.e., the ratio of CD3:CD28 is less than one. In certain aspects, the ratio of anti CD28 antibody to anti CD3 antibody bound to the beads is greater than 2:1. In one particular aspect, a 1:100 CD3:CD28 ratio of antibody bound to beads is used. In one aspect, a 1:75 CD3:CD28 ratio of antibody bound to beads is used. In a further aspect, a 1:50 CD3:CD28 ratio of antibody bound to beads is used. In one aspect, a 1:30 CD3:CD28 ratio of antibody bound to beads is used. In one preferred aspect, a 1:10 CD3:CD28 ratio of antibody bound to beads is used. In one aspect, a 1:3 CD3:CD28 ratio of antibody bound to the beads is used. In yet one aspect, a 3:1 CD3:CD28 ratio of antibody bound to the beads is used.

[0888] Ratios of particles to cells from 1:500 to 500:1 and any integer values in between may be used to stimulate T cells or other target cells. As those of ordinary skill in the art can readily appreciate, the ratio of particles to cells may depend on particle size relative to the target cell. For example, small sized beads could only bind a few cells, while larger beads could bind many. In certain aspects the ratio of cells to particles ranges from 1:100 to 100:1 and any integer values in-between and in further aspects the ratio comprises 1:9 to 9:1 and any integer values in between, can also be used to stimulate T cells. The ratio of anti-CD3- and anti-CD28-coupled particles to T cells that result in T cell stimulation can vary as noted above, however certain preferred values include 1:100, 1:50, 1:40, 1:30, 1:20, 1:10, 1:9, 1:8, 1:7, 1:6, 1:5, 1:4, 1:3, 1:2, 1:1, 2:1, 3:1, 4:1, 5:1, 6:1, 7:1, 8:1, 9:1, 10:1, and 15:1 with one preferred ratio being at least 1:1 particles per T cell. In one aspect, a ratio of particles to cells of 1:1 or less is used. In one particular aspect, a preferred particle: cell ratio is 1:5. In further aspects, the ratio of particles to cells can be varied depending on the day of stimulation. For example, in one aspect, the ratio of particles to cells is from 1:1 to 10:1 on the first day and additional particles are added to the cells every day or every other day thereafter for up to 10 days, at final ratios of from 1:1 to 1:10 (based on cell counts on the day of addition). In one particular aspect, the ratio of particles to cells is 1:1 on the first day of stimulation and adjusted to 1:5 on the third and fifth days of stimulation. In one aspect, particles are added on a daily or every other day basis to a final ratio of 1:1 on the first day, and 1:5 on the third and fifth days of stimulation. In one aspect, the ratio of particles to cells is 2:1 on the first day of stimulation and adjusted to 1:10 on the third and fifth days of stimulation. In one aspect, particles are added on a daily or every other day basis to a final ratio of 1:1 on the first day, and 1:10 on the third and fifth days of stimulation. One of skill in the art will appreciate that a variety of other ratios may be suitable for use in the present invention. In particular, ratios will vary depending on particle size and on cell size and type. In one aspect, the most typical ratios for use are in the neighborhood of 1:1, 2:1 and 3:1 on the first day.

[0889] In further aspects, the cells, such as T cells, are combined with agent-coated beads, the beads and the cells are subsequently separated, and then the cells are cultured. In an alternative aspect, prior to culture, the agent-coated beads and cells are not separated but are cultured together. In a further aspect, the beads and cells are first concentrated by application of a force, such as a magnetic force, resulting in increased ligation of cell surface markers, thereby inducing cell stimulation.

[0890] By way of example, cell surface proteins may be ligated by allowing paramagnetic beads to which anti-CD3 and anti-CD28 are attached (3×28 beads) to contact the T cells. In one aspect the cells (for example, 10⁴ to 10⁹ T cells) and beads (for example, DYNABEADS® M-450 CD3/CD28 T paramagnetic beads at a ratio of 1:1) are combined in a buffer, for example PBS (without divalent cations such as, calcium and magnesium). Again, those of ordinary skill in the art can readily appreciate any cell concentration may be used. For example, the target cell may be very rare in the sample and comprise only 0.01% of the sample or the entire sample (i.e., 100%) may comprise the target cell of interest. Accordingly, any cell number is within the context of the present invention. In certain aspects, it may be desirable to significantly decrease the volume in which particles and cells are mixed together (i.e., increase the concentration of cells), to ensure maximum contact of cells and particles. For example, in one aspect, a concentration of about 10 billion cells/ml, 9 billion/ml, 8 billion/ml, 7 billion/ml, 6 billion/ml, 5 billion/ml, or 2 billion cells/ml is used. In one aspect, greater than 100 million cells/ml is used. In a further aspect, a concentration of cells of 10, 15, 20, 25, 30, 35, 40, 45, or 50 million cells/ml is used. In yet one aspect, a concentration of cells from 75, 80, 85, 90, 95, or 100 million cells/ml is used. In further aspects, concentrations of 125 or 150 million cells/ml can be used. Using high concentrations can result in increased cell yield, cell activation, and cell expansion. Further, use of high cell concentrations allows more efficient capture of cells that may weakly express target antigens of interest, such as CD28-negative T cells. Such populations of cells may have therapeutic value and would be desirable to obtain in certain aspects. For example, using high concentration of cells allows more efficient selection of CD8+ T cells that normally have weaker CD28 expression.

[0891] In one embodiment, cells transduced with a nucleic acid encoding a CAR, e.g., a CAR described herein, are expanded, e.g., by a method described herein. In one embodiment, the cells are expanded in culture for a period of several hours (e.g., about 2, 3, 4, 5, 6, 7, 8, 9, 10, 15, 18, 21 hours) to about 14 days (e.g., 1, 2, 3, 4, 5, 6, 7, 8, 9, 10, 11, 12, 13 or 14 days). In one embodiment, the cells are expanded for a period of 4 to 9 days. In one embodiment, the cells are expanded for a period of 8 days or less, e.g., 7, 6 or 5 days. In one embodiment, the cells, e.g., a CD19 CAR cell described herein, are expanded in culture for 5 days, and the resulting cells are more potent than the same cells expanded in culture for 9 days under the same culture conditions. Potency can be defined, e.g., by various T cell functions, e.g. proliferation, target cell killing, cytokine production, activation, migration, or combinations thereof. In one embodiment, the cells, e.g., a CD19 CAR cell described herein, expanded for 5 days show at least a one, two, three or four fold increase in cells doublings upon antigen stimulation as compared to the same cells expanded in culture for 9 days under the same culture conditions. In one embodiment, the cells, e.g., the cells expressing a CD19 CAR described herein, are expanded in culture for 5 days, and the resulting cells exhibit higher proinflammatory cytokine production, e.g., IFN-γ and/or GM-CSF levels, as compared to the same cells expanded in culture for 9 days under the same culture conditions. In one embodiment, the cells, e.g., a CD19 CAR cell described herein, expanded for 5 days show at least a one, two, three, four, five, ten fold or more increase in pg/ml of proinflammatory cytokine production, e.g., IFN-γ and/or GM-CSF levels, as compared to the same cells expanded in culture for 9 days under the same culture conditions.

[0892] Several cycles of stimulation may also be desired such that culture time of T cells can be 60 days or more. Conditions appropriate for T cell culture include an appropriate media (e.g., Minimal Essential Media or RPMI Media 1640 or, X-vivo 15, (Lonza)) that may contain factors necessary for proliferation and viability, including serum (e.g., fetal bovine or human serum), interleukin-2 (IL-2), insulin, IFN-γ, IL-4, IL-7, GM-CSF, IL-10, IL-12, IL-15, TGFβ, and TNF-α or any other additives for the growth of cells known to the skilled artisan. Other additives for the growth of cells include, but are not limited to, surfactant, plasmanate, and reducing agents such as N-acetyl-cysteine and 2-mercaptoethanol. Media can include RPMI 1640, AIM-V, DMEM, MEM, u-MEM, F-12, X-Vivo 15, and X-Vivo 20, Optimizer, with added amino acids, sodium pyruvate, and vitamins, either serum-free or supplemented with an appropriate amount of serum (or plasma) or a defined set of hormones, and/or an amount of cytokine(s) sufficient for the growth and expansion of T cells. Antibiotics, e.g., penicillin and streptomycin, are included only in experimental cultures, not in cultures of cells that are to be infused into a subject. The target cells are maintained under conditions necessary to support growth, for example, an appropriate temperature (e.g., 37° C.) and atmosphere (e.g., air plus 5% CO2).

[0893] In one embodiment, the cells are expanded in an appropriate media (e.g., media described herein) that includes one or more interleukin that result in at least a 200-fold (e.g., 200-fold, 250-fold, 300-fold, 350-fold) increase in cells over a 14 day expansion period, e.g., as measured by a method described herein such as flow cytometry. In one embodiment, the cells are expanded in the presence of IL-15 and/or IL-7 (e.g., IL-15 and IL-7).

[0894] In embodiments, methods described herein, e.g., CAR-expressing cell manufacturing methods, comprise removing T regulatory cells, e.g., CD25+ T cells, from a cell population, e.g., using an anti-CD25 antibody, or fragment thereof, or a CD25-binding ligand, IL-2. Methods of removing T regulatory cells, e.g., CD25+ T cells, from a cell population are described herein. In embodiments, the methods, e.g., manufacturing methods, further comprise contacting a cell population (e.g., a cell population in which T regulatory cells, such as CD25+ T cells, have been depleted; or a cell population that has previously contacted an anti-CD25 antibody, fragment thereof, or CD25-binding ligand) with IL-15 and/or IL-7. For example, the cell population (e.g., that has previously contacted an anti-CD25 antibody, fragment thereof, or CD25-binding ligand) is expanded in the presence of IL-15 and/or IL-7.

[0895] In some embodiments a CAR-expressing cell described herein is contacted with a composition comprising a interleukin-15 (IL-15) polypeptide, a interleukin-15 receptor alpha (IL-15Ra) polypeptide, or a combination of both a IL-15 polypeptide and a IL-15Ra polypeptide e.g., hetIL-15, during the manufacturing of the CAR-expressing cell, e.g., ex vivo. In embodiments, a CAR-expressing cell described herein is contacted with a composition comprising a IL-15 polypeptide during the manufacturing of the CAR-expressing cell, e.g., ex vivo. In embodiments, a CAR-expressing cell described herein is contacted with a composition comprising a combination of both a IL-15 polypeptide and a IL-15 Ra polypeptide during the manufacturing of the CAR-expressing cell, e.g., ex vivo. In embodiments, a CAR-expressing cell described herein is contacted with a composition comprising hetIL-15 during the manufacturing of the CAR-expressing cell, e.g., ex vivo.

[0896] In one embodiment the CAR-expressing cell described herein is contacted with a composition comprising hetIL-15 during ex vivo expansion. In an embodiment, the CAR-expressing cell described herein is contacted with a composition comprising an IL-15 polypeptide during ex vivo expansion. In an embodiment, the CAR-expressing cell described herein is contacted with a composition comprising both an IL-15 polypeptide and an IL-15Ra polypeptide during ex vivo expansion. In one embodiment the contacting results in the survival and proliferation of a lymphocyte subpopulation, e.g., CD8+ T cells.

[0897] T cells that have been exposed to varied stimulation times may exhibit different characteristics. For example, typical blood or apheresed peripheral blood mononuclear cell products have a helper T cell population (TH, CD4+) that is greater than the cytotoxic or suppressor T cell population (TC, CD8+). Ex vivo expansion of T cells by stimulating CD3 and CD28 receptors produces a population of T cells that prior to about days 8-9 consists predominately of TH cells, while after about days 8-9, the population of T cells comprises an increasingly greater population of TC cells. Accordingly, depending on the purpose of treatment, infusing a subject with a T cell population comprising predominately of TH cells may be advantageous. Similarly, if an antigen-specific subset of TC cells has been isolated it may be beneficial to expand this subset to a greater degree.

[0898] Further, in addition to CD4 and CD8 markers, other phenotypic markers vary significantly, but in large part, reproducibly during the course of the cell expansion process. Thus, such reproducibility enables the ability to tailor an activated T cell product for specific purposes.

[0899] Once a CAR described herein is constructed, various assays can be used to evaluate the activity of the molecule, such as but not limited to, the ability to expand T cells following antigen stimulation, sustain T cell expansion in the absence of re-stimulation, and anti-cancer activities in appropriate in vitro and animal models. Assays to evaluate the effects of a cars of the present invention are described in further detail below

[0900] Western blot analysis of CAR expression in primary T cells can be used to detect the presence of monomers and dimers. See, e.g., Milone et al., Molecular Therapy 17(8): 1453-1464 (2009). Very briefly, T cells (1:1 mixture of CD4⁺ and CD8⁺ T cells) expressing the CARs are expanded in vitro for more than 10 days followed by lysis and SDS-PAGE under reducing conditions. CARs containing the full length TCR-ζ cytoplasmic domain and the endogenous TCR-ζ chain are detected by western blotting using an antibody to the TCR-ζ chain. The same T cell subsets are used for SDS-PAGE analysis under non-reducing conditions to permit evaluation of covalent dimer formation.

[0901] In vitro expansion of CAR⁺ T cells following antigen stimulation can be measured by flow cytometry. For example, a mixture of CD4⁺ and CD8⁺ T cells are stimulated with αCD3/αCD28 aAPCs followed by transduction with lentiviral vectors expressing GFP under the control of the promoters to be analyzed. Exemplary promoters include the CMV IE gene, EF-1α, ubiquitin C, or phosphoglycerokinase (PGK) promoters. GFP fluorescence is evaluated on day 6 of culture in the CD4⁺ and/or CD8⁺ T cell subsets by flow cytometry. See, e.g., Milone et al., Molecular Therapy 17(8): 1453-1464 (2009). Alternatively, a mixture of CD4⁺ and CD8⁺ T cells are stimulated with αCD3/αCD28 coated magnetic beads on day 0, and transduced with CAR on day 1 using a bicistronic lentiviral vector expressing CAR along with eGFP using a 2A ribosomal skipping sequence. Cultures are re-stimulated with either a cancer associated antigen as described herein⁺ K562 cells (K562 expressing a cancer associated antigen as described herein), wild-type K562 cells (K562 wild type) or K562 cells expressing hCD32 and 4-1BBL in the presence of antiCD3 and anti-CD28 antibody (K562-BBL-3/28) following washing. Exogenous IL-2 is added to the cultures every other day at 100 IU/ml. GFP⁺ T cells are enumerated by flow cytometry using bead-based counting. See, e.g., Milone et al., Molecular Therapy 17(8): 1453-1464 (2009).

[0902] Sustained CAR⁺ T cell expansion in the absence of re-stimulation can also be measured. See, e.g., Milone et al., Molecular Therapy 17(8): 1453-1464 (2009). Briefly, mean T cell volume (fl) is measured on day 8 of culture using a Coulter Multisizer III particle counter, a Nexcelom Cellometer Vision or Millipore Scepter, following stimulation with αCD3/αCD28 coated magnetic beads on day 0, and transduction with the indicated CAR on day 1.

[0903] Animal models can also be used to measure a CART activity. For example, xenograft model using human a cancer associated antigen described herein-specific CAR⁺ T cells to treat a primary human pre-B ALL in immunodeficient mice can be used. See, e.g., Milone et al., Molecular Therapy 17(8): 1453-1464 (2009). Very briefly, after establishment of ALL, mice are randomized as to treatment groups. Different numbers of a cancer associated antigen-specific CAR engineered T cells are coinjected at a 1:1 ratio into NOD-SCID-γ^{-/-} mice bearing B-ALL. The number of copies of a cancer associated antigen-specific CAR vector in spleen DNA from mice is evaluated at various times following T cell injection. Animals are assessed for leukemia at weekly intervals. Peripheral blood a cancer associate antigen as described herein⁺ B-ALL blast cell counts are measured in mice that are injected with a cancer associated antigen described herein-ζ CAR⁺ T cells or mock-transduced T cells. Survival curves for the groups are compared using the log-rank test. In addition, absolute peripheral blood CD4⁺ and CD8⁺ T cell counts 4 weeks following T cell injection in NOD-SCID-γ^{-/-} mice can also be analyzed. Mice are injected with leukemic cells and 3 weeks later are injected with T cells engineered to express CAR by a bicistronic lentiviral vector that encodes the CAR linked to eGFP. T cells are normalized to 45-50% input GFP⁺ T cells by mixing with mock-transduced cells prior to injection, and confirmed by flow cytometry. Animals are assessed for leukemia at 1-week intervals. Survival curves for the CAR⁺ T cell groups are compared using the log-rank test.

[0904] Dose dependent CAR treatment response can be evaluated. See, e.g., Milone et al., Molecular Therapy 17(8): 1453-1464 (2009). For example, peripheral blood is obtained 35-70 days after establishing leukemia in mice injected on day 21 with CAR T cells, an equivalent number of mock-transduced T cells, or no T cells. Mice from each group are randomly bled for determination of peripheral blood a cancer associate antigen as described herein⁺ ALL blast counts and then killed on days 35 and 49. The remaining animals are evaluated on days 57 and 70.

[0905] Assessment of cell proliferation and cytokine production has been previously described, e.g., at Milone et al., Molecular Therapy 17(8): 1453-1464 (2009). Briefly, assessment of CAR-mediated proliferation is performed in microtiter plates by mixing washed T cells with K562 cells expressing a cancer associated antigen described herein (K19) or CD32 and CD137 (KT32-BBL) for a final T-cell:K562 ratio of 2:1. K562 cells are irradiated with gamma-radiation prior to use. Anti-CD3 (clone OKT3) and anti-CD28 (clone 9.3) monoclonal antibodies are added to cultures with KT32-BBL cells to serve as a positive control for stimulating T-cell proliferation since these signals support long-term CD8⁺ T cell expansion ex vivo. T cells are enumerated in cultures using CountBright™ fluorescent beads (Invitrogen, Carlsbad, CA) and flow cytometry as described by the manufacturer. CAR⁺ T cells are identified by GFP expression using T cells that are engineered with eGFP-2A linked CAR-expressing lentiviral vectors. For CAR+ T cells not expressing GFP, the CAR+ T cells are detected with biotinylated recombinant a cancer associate antigen as described herein protein and a secondary avidin-PE conjugate. CD4⁺ and CD8⁺ expression on T cells are also simultaneously detected with specific monoclonal antibodies (BD Biosciences). Cytokine measurements are performed on supernatants collected 24 hours following re-stimulation using the human TH1/TH2 cytokine cytometric bead array kit (BD Biosciences, San Diego, CA) according the manufacturer's instructions. Fluorescence is assessed using a FACScalibur flow cytometer, and data is analyzed according to the manufacturer's instructions.

[0906] Cytotoxicity can be assessed by a standard 51Cr-release assay. See, e.g., Milone et al., Molecular Therapy 17(8): 1453-1464 (2009). Briefly, target cells (K562 lines and primary pro-B-ALL cells) are loaded with 51Cr (as NaCrO4, New England Nuclear, Boston, MA) at 37° C. for 2 hours with frequent agitation, washed twice in complete RPMI and plated into microtiter plates. Effector T cells are mixed with target cells in the wells in complete RPMI at varying ratios of effector cell:target cell (E:T). Additional wells containing media only (spontaneous release, SR) or a 1% solution of triton-X 100 detergent (total release, TR) are also prepared. After 4 hours of incubation at 37° C., supernatant from each well is harvested. Released 51Cr is then measured using a gamma particle counter (Packard Instrument Co., Waltham, MA). Each condition is performed in at least triplicate, and the percentage of lysis is calculated using the formula: % Lysis=(ER−SR)/(TR −SR), where ER represents the average 51Cr released for each experimental condition.

[0907] Imaging technologies can be used to evaluate specific trafficking and proliferation of CARs in tumor-bearing animal models. Such assays have been described, for example, in Barrett et al., Human Gene Therapy 22:1575-1586 (2011). Briefly, NOD/SCID/γc^{-/-} (NSG) mice are injected IV with Nalm-6 cells followed 7 days later with T cells 4 hour after electroporation with the CAR constructs. The T cells are stably transfected with a lentiviral construct to express firefly luciferase, and mice are imaged for bioluminescence. Alternatively, therapeutic efficacy and specificity of a single injection of CAR+ T cells in Nalm-6 xenograft model can be measured as the following: NSG mice are injected with Nalm-6 transduced to stably express firefly luciferase, followed by a single tail-vein injection of T cells electroporated with cars of the present invention 7 days later. Animals are imaged at various time points post injection. For example, photon-density heat maps of firefly luciferase positive leukemia in representative mice at day 5 (2 days before treatment) and day 8 (24 hr post CAR⁺ PBLs) can be generated.

[0908] Other assays, including those described in the Example section herein as well as those that are known in the art can also be used to evaluate the CARs described herein.

### Therapeutic Application

[0909] The modified cells described herein may be included in a composition for therapy. In one aspect, the composition comprises a population of modified T cells comprising a nucleic acid sequence encoding a CAR, wherein the CAR comprises a mutant CD28 costimulatory domain. In another aspect, the composition comprises the modified T cell comprising a nucleic acid sequence encoding a CAR, wherein the CAR comprises a mutant CD28 costimulatory domain that increases anti-tumor effect and T cell persistence. In yet another embodiment, the composition includes a modified T cell comprising a CAR that comprises a costimulatory domain described herein, e.g., that increases anti-tumor effect and T cell persistence. The composition may include a pharmaceutical composition and further include a pharmaceutically acceptable carrier. A therapeutically effective amount of the pharmaceutical composition comprising the modified cells may be administered.

[0910] In one aspect, the invention includes a method comprising administering a population of modified T cells to a subject in need thereof to prevent or treat a tumor, wherein the modified T cells comprise a nucleic acid sequence encoding a CAR and a nucleic acid sequence encoding a peptide described herein, e.g., a peptide comprising an amphipathic helix domain and a cluster of basic amino acids, wherein the peptide disrupts PKA and an AKAP association.

[0911] In another aspect, the invention includes a method comprising administering a population of modified cells to a subject in need thereof to prevent or treat a tumor that is adverse to the subject, wherein the modified cells comprise a CAR and a peptide described herein, e.g., a peptide that disrupts PKA and an AKAP binding.

[0912] In one aspect, the invention provides methods for treating a disease associated with expression of a cancer associated antigen described herein.

[0913] In one aspect, the present invention provides methods of treating cancer by providing to the subject in need thereof immune effector cells (e.g., T cells, NK cells) that are engineered to express an XCAR, wherein X represents a tumor antigen as described herein, and wherein the cancer cells express said X tumor antigen.

[0914] In one aspect, the present invention provides methods of treating cancer by providing to the subject in need thereof immune effector cells (e.g., T cells, NK cells) that are engineered to express a XCAR described herein, wherein the cancer cells express X. In one embodiment, X is expressed on both normal cells and cancers cells, but is expressed at lower levels on normal cells. In one embodiment, the method further comprises selecting a CAR that binds X with an affinity that allows the XCAR to bind and kill the cancer cells expressing X but less than 30%, 25%, 20%, 15%, 10%, 5% or less of the normal cells expressing X are killed, e.g., as determined by an assay described herein. In one embodiment, the selected CAR has an antigen binding domain that has a binding affinity KD of 10⁻⁴ M to 10⁻⁸ M, e.g., 10⁻⁵ M to 10⁻⁷ M, e.g., 10⁻⁶ M or 10⁻⁷ M, for the target antigen. In one embodiment, the selected antigen binding domain has a binding affinity that is at least five-fold, 10-fold, 20-fold, 30-fold, 50-fold, 100-fold or 1,000-fold less than a reference antibody, e.g., an antibody described herein.

[0915] In one embodiment, the present invention provides methods of treating cancer by providing to the subject in need thereof immune effector cells (e.g., T cells, NK cells) that are engineered to express CD19 CAR, wherein the cancer cells express CD19. In one embodiment, the cancer to be treated is ALL (acute lymphoblastic leukemia), CLL (chronic lymphocytic leukemia), DLBCL (diffuse large B-cell lymphoma), MCL (Mantle cell lymphoma, or MM (multiple myeloma).

[0916] In one aspect, the present invention provides methods of treating cancer by providing to the subject in need thereof immune effector cells (e.g., T cells, NK cells) that are engineered to express an EGFRvIIICAR, wherein the cancer cells express EGFRvIII. In one embodiment, the cancer to be treated is glioblastoma.

[0917] In one aspect, the present invention provides methods of treating cancer by providing to the subject in need thereof immune effector cells (e.g., T cells, NK cells) that are engineered to express a mesothelinCAR, wherein the cancer cells express mesothelin. In one embodiment, the cancer to be treated is mesothelioma, pancreatic cancer, or ovarian cancer.

[0918] In one aspect, the present invention provides methods of treating cancer by providing to the subject in need thereof immune effector cells (e.g., T cells, NK cells) that are engineered to express a CD123CAR, wherein the cancer cells express CD123. In one embodiment, the cancer to be treated is AML.

[0919] In one aspect, the present invention provides methods of treating cancer by providing to the subject in need thereof immune effector cells (e.g., T cells, NK cells) that are engineered to express a CD22CAR, wherein the cancer cells express CD22. In one embodiment, the cancer to be treated is B cell malignancies.

[0920] In one aspect, the present invention provides methods of treating cancer by providing to the subject in need thereof immune effector cells (e.g., T cells, NK cells) that are engineered to express a CS-1CAR, wherein the cancer cells express CS-1. In one embodiment, the cancer to be treated is multiple myeloma.

[0921] In one aspect, the present invention provides methods of treating cancer by providing to the subject in need thereof immune effector cells (e.g., T cells, NK cells) that are engineered to express a CLL-1CAR, wherein the cancer cells express CLL-1. In one embodiment, the cancer to be treated is AML.

[0922] In one aspect, the present invention provides methods of treating cancer by providing to the subject in need thereof immune effector cells (e.g., T cells, NK cells) that are engineered to express a CD33CAR, wherein the cancer cells express CD33. In one embodiment, the cancer to be treated is AML.

[0923] In one aspect, the present invention provides methods of treating cancer by providing to the subject in need thereof immune effector cells (e.g., T cells, NK cells) that are engineered to express a GD2CAR, wherein the cancer cells express GD2. In one embodiment, the cancer to be treated is neuroblastoma.

[0924] In one aspect, the present invention provides methods of treating cancer by providing to the subject in need thereof immune effector cells (e.g., T cells, NK cells) that are engineered to express a BCMACAR, wherein the cancer cells express BCMA. In one embodiment, the cancer to be treated is multiple myeloma.

[0925] In one aspect, the present invention provides methods of treating cancer by providing to the subject in need thereof immune effector cells (e.g., T cells, NK cells) that are engineered to express a TnCAR, wherein the cancer cells express Tn antigen. In one embodiment, the cancer to be treated is ovarian cancer.

[0926] In one aspect, the present invention provides methods of treating cancer by providing to the subject in need thereof immune effector cells (e.g., T cells, NK cells) that are engineered to express a PSMACAR, wherein the cancer cells express PSMA. In one embodiment, the cancer to be treated is prostate cancer.

[0927] In one aspect, the present invention provides methods of treating cancer by providing to the subject in need thereof immune effector cells (e.g., T cells, NK cells) that are engineered to express a ROR1CAR, wherein the cancer cells express ROR1. In one embodiment, the cancer to be treated is B cell malignancies.

[0928] In one aspect, the present invention provides methods of treating cancer by providing to the subject in need thereof immune effector cells (e.g., T cells, NK cells) that are engineered to express a FLT3 CAR, wherein the cancer cells express FLT3. In one embodiment, the cancer to be treated is AML.

[0929] In one aspect, the present invention provides methods of treating cancer by providing to the subject in need thereof immune effector cells (e.g., T cells, NK cells) that are engineered to express a TAG72CAR, wherein the cancer cells express TAG72. In one embodiment, the cancer to be treated is gastrointestinal cancer.

[0930] In one aspect, the present invention provides methods of treating cancer by providing to the subject in need thereof immune effector cells (e.g., T cells, NK cells) that are engineered to express a CD38CAR, wherein the cancer cells express CD38. In one embodiment, the cancer to be treated is multiple myeloma.

[0931] In one aspect, the present invention provides methods of treating cancer by providing to the subject in need thereof immune effector cells (e.g., T cells, NK cells) that are engineered to express a CD44v6CAR, wherein the cancer cells express CD44v6. In one embodiment, the cancer to be treated is cervical cancer, AML, or MM.

[0932] In one aspect, the present invention provides methods of treating cancer by providing to the subject in need thereof immune effector cells (e.g., T cells, NK cells) that are engineered to express a CEACAR, wherein the cancer cells express CEA. In one embodiment, the cancer to be treated is gastrointestinal cancer, or pancreatic cancer.

[0933] In one aspect, the present invention provides methods of treating cancer by providing to the subject in need thereof immune effector cells (e.g., T cells, NK cells) that are engineered to express an EPCAMCAR, wherein the cancer cells express EPCAM. In one embodiment, the cancer to be treated is gastrointestinal cancer.

[0934] In one aspect, the present invention provides methods of treating cancer by providing to the subject in need thereof immune effector cells (e.g., T cells, NK cells) that are engineered to express a B7H3CAR, wherein the cancer cells express B7H3.

[0935] In one aspect, the present invention provides methods of treating cancer by providing to the subject in need thereof immune effector cells (e.g., T cells, NK cells) that are engineered to express a KITCAR, wherein the cancer cells express KIT. In one embodiment, the cancer to be treated is gastrointestinal cancer.

[0936] In one aspect, the present invention provides methods of treating cancer by providing to the subject in need thereof immune effector cells (e.g., T cells, NK cells) that are engineered to express an IL-13Ra2CAR, wherein the cancer cells express IL-13Ra2. In one embodiment, the cancer to be treated is glioblastoma.

[0937] In one aspect, the present invention provides methods of treating cancer by providing to the subject in need thereof immune effector cells (e.g., T cells, NK cells) that are engineered to express a PRSS21CAR, wherein the cancer cells express PRSS21. In one embodiment, the cancer to be treated is selected from ovarian, pancreatic, lung and breast cancer.

[0938] In one aspect, the present invention provides methods of treating cancer by providing to the subject in need thereof immune effector cells (e.g., T cells, NK cells) that are engineered to express a CD30CAR, wherein the cancer cells express CD30. In one embodiment, the cancer to be treated is lymphomas, or leukemias.

[0939] In one aspect, the present invention provides methods of treating cancer by providing to the subject in need thereof immune effector cells (e.g., T cells, NK cells) that are engineered to express a GD3CAR, wherein the cancer cells express GD3. In one embodiment, the cancer to be treated is melanoma.

[0940] In one aspect, the present invention provides methods of treating cancer by providing to the subject in need thereof immune effector cells (e.g., T cells, NK cells) that are engineered to express a CD171CAR, wherein the cancer cells express CD171. In one embodiment, the cancer to be treated is neuroblastoma, ovarian cancer, melanoma, breast cancer, pancreatic cancer, colon cancers, or NSCLC (non-small cell lung cancer).

[0941] In one aspect, the present invention provides methods of treating cancer by providing to the subject in need thereof immune effector cells (e.g., T cells, NK cells) that are engineered to express an IL-11RaCAR, wherein the cancer cells express IL-11Ra. In one embodiment, the cancer to be treated is osteosarcoma.

[0942] In one aspect, the present invention provides methods of treating cancer by providing to the subject in need thereof immune effector cells (e.g., T cells, NK cells) that are engineered to express a PSCACAR, wherein the cancer cells express PSCA. In one embodiment, the cancer to be treated is prostate cancer.

[0943] In one aspect, the present invention provides methods of treating cancer by providing to the subject in need thereof immune effector cells (e.g., T cells, NK cells) that are engineered to express a VEGFR2CAR, wherein the cancer cells express VEGFR2. In one embodiment, the cancer to be treated is a solid tumor.

[0944] In one aspect, the present invention provides methods of treating cancer by providing to the subject in need thereof immune effector cells (e.g., T cells, NK cells) that are engineered to express a LewisYCAR, wherein the cancer cells express LewisY. In one embodiment, the cancer to be treated is ovarian cancer, or AML.

[0945] In one aspect, the present invention provides methods of treating cancer by providing to the subject in need thereof immune effector cells (e.g., T cells, NK cells) that are engineered to express a CD24CAR, wherein the cancer cells express CD24. In one embodiment, the cancer to be treated is pancreatic cancer.

[0946] In one aspect, the present invention provides methods of treating cancer by providing to the subject in need thereof immune effector cells (e.g., T cells, NK cells) that are engineered to express a PDGFR-betaCAR, wherein the cancer cells express PDGFR-beta.

[0947] In one embodiment, the cancer to be treated is breast cancer, prostate cancer, GIST (gastrointestinal stromal tumor), CML, DFSP (dermatofibrosarcoma protuberans), or glioma.

[0948] In one aspect, the present invention provides methods of treating cancer by providing to the subject in need thereof immune effector cells (e.g., T cells, NK cells) that are engineered to express a SSEA-4CAR, wherein the cancer cells express SSEA-4. In one embodiment, the cancer to be treated is glioblastoma, breast cancer, lung cancer, or stem cell cancer.

[0949] In one aspect, the present invention provides methods of treating cancer by providing to the subject in need thereof immune effector cells (e.g., T cells, NK cells) that are engineered to express a CD20CAR, wherein the cancer cells express CD20. In one embodiment, the cancer to be treated is B cell malignancies.

[0950] In one aspect, the present invention provides methods of treating cancer by providing to the subject in need thereof immune effector cells (e.g., T cells, NK cells) that are engineered to express a Folate receptor alphaCAR, wherein the cancer cells express folate receptor alpha. In one embodiment, the cancer to be treated is ovarian cancer, NSCLC, endometrial cancer, renal cancer, or other solid tumors.

[0951] In one aspect, the present invention provides methods of treating cancer by providing to the subject in need thereof immune effector cells (e.g., T cells, NK cells) that are engineered to express an ERBB2CAR, wherein the cancer cells express ERBB2 (Her2/neu). In one embodiment, the cancer to be treated is breast cancer, gastric cancer, colorectal cancer, lung cancer, or other solid tumors.

[0952] In one aspect, the present invention provides methods of treating cancer by providing to the subject in need thereof immune effector cells (e.g., T cells, NK cells) that are engineered to express a MUC1CAR, wherein the cancer cells express MUC1. In one embodiment, the cancer to be treated is breast cancer, lung cancer, or other solid tumors.

[0953] In one aspect, the present invention provides methods of treating cancer by providing to the subject in need thereof immune effector cells (e.g., T cells, NK cells) that are engineered to express an EGFRCAR, wherein the cancer cells express EGFR. In one embodiment, the cancer to be treated is glioblastoma, SCLC (small cell lung cancer), SCCHN (squamous cell carcinoma of the head and neck), NSCLC, or other solid tumors.

[0954] In one aspect, the present invention provides methods of treating cancer by providing to the subject in need thereof immune effector cells (e.g., T cells, NK cells) that are engineered to express a NCAMCAR, wherein the cancer cells express NCAM. In one embodiment, the cancer to be treated is neuroblastoma, or other solid tumors.

[0955] In one aspect, the present invention provides methods of treating cancer by providing to the subject in need thereof immune effector cells (e.g., T cells, NK cells) that are engineered to express a CAIXCAR, wherein the cancer cells express CAIX. In one embodiment, the cancer to be treated is renal cancer, CRC, cervical cancer, or other solid tumors.

[0956] In one aspect, the present invention provides methods of treating cancer by providing to the subject in need thereof immune effector cells (e.g., T cells, NK cells) that are engineered to express an EphA2CAR, wherein the cancer cells express EphA2. In one embodiment, the cancer to be treated is GBM.

[0957] In one aspect, the present invention provides methods of treating cancer by providing to the subject in need thereof immune effector cells (e.g., T cells, NK cells) that are engineered to express a GD3CAR, wherein the cancer cells express GD3. In one embodiment, the cancer to be treated is melanoma.

[0958] In one aspect, the present invention provides methods of treating cancer by providing to the subject in need thereof immune effector cells (e.g., T cells, NK cells) that are engineered to express a Fucosyl GM1CAR, wherein the cancer cells express Fucosyl GM

[0959] In one aspect, the present invention provides methods of treating cancer by providing to the subject in need thereof immune effector cells (e.g., T cells, NK cells) that are engineered to express a sLeCAR, wherein the cancer cells express sLe. In one embodiment, the cancer to be treated is NSCLC, or AML.

[0960] In one aspect, the present invention provides methods of treating cancer by providing to the subject in need thereof immune effector cells (e.g., T cells, NK cells) that are engineered to express a GM3CAR, wherein the cancer cells express GM3.

[0961] In one aspect, the present invention provides methods of treating cancer by providing to the subject in need thereof immune effector cells (e.g., T cells, NK cells) that are engineered to express a TGS5CAR, wherein the cancer cells express TGS5.

[0962] In one aspect, the present invention provides methods of treating cancer by providing to the subject in need thereof immune effector cells (e.g., T cells, NK cells) that are engineered to express a HMWMAACAR, wherein the cancer cells express HMWMAA. In one embodiment, the cancer to be treated is melanoma, glioblastoma, or breast cancer.

[0963] In one aspect, the present invention provides methods of treating cancer by providing to the subject in need thereof immune effector cells (e.g., T cells, NK cells) that are engineered to express an o-acetyl-GD2CAR, wherein the cancer cells express o-acetyl-GD2. In one embodiment, the cancer to be treated is neuroblastoma, or melanoma.

[0964] In one aspect, the present invention provides methods of treating cancer by providing to the subject in need thereof immune effector cells (e.g., T cells, NK cells) that are engineered to express a CD19CAR, wherein the cancer cells express CD19. In one embodiment, the cancer to be treated is Follicular lymphoma, CLL, ALL, or myeloma.

[0965] In one aspect, the present invention provides methods of treating cancer by providing to the subject in need thereof immune effector cells (e.g., T cells, NK cells) that are engineered to express a TEM1/CD248CAR, wherein the cancer cells express TEM1/CD248. In one embodiment, the cancer to be treated is a solid tumor.

[0966] In one aspect, the present invention provides methods of treating cancer by providing to the subject in need thereof immune effector cells (e.g., T cells, NK cells) that are engineered to express a TEM7RCAR, wherein the cancer cells express TEM7R. In one embodiment, the cancer to be treated is solid tumor.

[0967] In one aspect, the present invention provides methods of treating cancer by providing to the subject in need thereof immune effector cells (e.g., T cells, NK cells) that are engineered to express a CLDN6CAR, wherein the cancer cells express CLDN6. In one embodiment, the cancer to be treated is ovarian cancer, lung cancer, or breast cancer.

[0968] In one aspect, the present invention provides methods of treating cancer by providing to the subject in need thereof immune effector cells (e.g., T cells, NK cells) that are engineered to express a TSHRCAR, wherein the cancer cells express TSHR. In one embodiment, the cancer to be treated is thyroid cancer, or multiple myeloma.

[0969] In one aspect, the present invention provides methods of treating cancer by providing to the subject in need thereof immune effector cells (e.g., T cells, NK cells) that are engineered to express a GPRC5DCAR, wherein the cancer cells express GPRC5D. In one embodiment, the cancer to be treated is multiple myeloma.

[0970] In one aspect, the present invention provides methods of treating cancer by providing to the subject in need thereof immune effector cells (e.g., T cells, NK cells) that are engineered to express a CXORF61CAR, wherein the cancer cells express CXORF61.

[0971] In one aspect, the present invention provides methods of treating cancer by providing to the subject in need thereof immune effector cells (e.g., T cells, NK cells) that are engineered to express a CD97CAR, wherein the cancer cells express CD97. In one embodiment, the cancer to be treated is B cell malignancies, gastric cancer, pancreatic cancer, esophageal cancer, glioblastoma, breast cancer, or colorectal cancer.

[0972] In one aspect, the present invention provides methods of treating cancer by providing to the subject in need thereof immune effector cells (e.g., T cells, NK cells) that are engineered to express a CD179aCAR, wherein the cancer cells express CD179a. In one embodiment, the cancer to be treated is B cell malignancies.

[0973] In one aspect, the present invention provides methods of treating cancer by providing to the subject in need thereof immune effector cells (e.g., T cells, NK cells) that are engineered to express an ALK CAR, wherein the cancer cells express ALK. In one embodiment, the cancer to be treated is NSCLC, ALCL (anaplastic large cell lymphoma), IMT (inflammatory myofibroblastic tumor), or neuroblastoma.

[0974] In one aspect, the present invention provides methods of treating cancer by providing to the subject in need thereof immune effector cells (e.g., T cells, NK cells) that are engineered to express a Polysialic acid CAR, wherein the cancer cells express Polysialic acid. In one embodiment, the cancer to be treated is small cell lung cancer.

[0975] In one aspect, the present invention provides methods of treating cancer by providing to the subject in need thereof immune effector cells (e.g., T cells, NK cells) that are engineered to express a PLAC1CAR, wherein the cancer cells express PLAC1. In one embodiment, the cancer to be treated is HCC (hepatocellular carcinoma).

[0976] In one aspect, the present invention provides methods of treating cancer by providing to the subject in need thereof immune effector cells (e.g., T cells, NK cells) that are engineered to express a GloboHCAR, wherein the cancer cells express GloboH. In one embodiment, the cancer to be treated is ovarian cancer, gastric cancer, prostate cancer, lung cancer, breast cancer, or pancreatic cancer.

[0977] In one aspect, the present invention provides methods of treating cancer by providing to the subject in need thereof immune effector cells (e.g., T cells, NK cells) that are engineered to express a NY—BR-1CAR, wherein the cancer cells express NY—BR-1. In one embodiment, the cancer to be treated is breast cancer.

[0978] In one aspect, the present invention provides methods of treating cancer by providing to the subject in need thereof immune effector cells (e.g., T cells, NK cells) that are engineered to express a UPK2CAR, wherein the cancer cells express UPK2. In one embodiment, the cancer to be treated is bladder cancer.

[0979] In one aspect, the present invention provides methods of treating cancer by providing to the subject in need thereof immune effector cells (e.g., T cells, NK cells) that are engineered to express a HAVCR1CAR, wherein the cancer cells express HAVCR1. In one embodiment, the cancer to be treated is renal cancer.

[0980] In one aspect, the present invention provides methods of treating cancer by providing to the subject in need thereof immune effector cells (e.g., T cells, NK cells) that are engineered to express a ADRB3CAR, wherein the cancer cells express ADRB3. In one embodiment, the cancer to be treated is Ewing sarcoma.

[0981] In one aspect, the present invention provides methods of treating cancer by providing to the subject in need thereof immune effector cells (e.g., T cells, NK cells) that are engineered to express a PANX3CAR, wherein the cancer cells express PANX3. In one embodiment, the cancer to be treated is osteosarcoma.

[0982] In one aspect, the present invention provides methods of treating cancer by providing to the subject in need thereof immune effector cells (e.g., T cells, NK cells) that are engineered to express a GPR20CAR, wherein the cancer cells express GPR20. In one embodiment, the cancer to be treated is GIST.

[0983] In one aspect, the present invention provides methods of treating cancer by providing to the subject in need thereof immune effector cells (e.g., T cells, NK cells) that are engineered to express a LY6KCAR, wherein the cancer cells express LY6K. In one embodiment, the cancer to be treated is breast cancer, lung cancer, ovary caner, or cervix cancer.

[0984] In one aspect, the present invention provides methods of treating cancer by providing to the subject in need thereof immune effector cells (e.g., T cells, NK cells) that are engineered to express a OR51E2CAR, wherein the cancer cells express OR51E2. In one embodiment, the cancer to be treated is prostate cancer.

[0985] In one aspect, the present invention provides methods of treating cancer by providing to the subject in need thereof immune effector cells (e.g., T cells, NK cells) that are engineered to express a TARPCAR, wherein the cancer cells express TARP. In one embodiment, the cancer to be treated is prostate cancer.

[0986] In one aspect, the present invention provides methods of treating cancer by providing to the subject in need thereof immune effector cells (e.g., T cells, NK cells) that are engineered to express a WT1CAR, wherein the cancer cells express WT1.

[0987] In one aspect, the present invention provides methods of treating cancer by providing to the subject in need thereof immune effector cells (e.g., T cells, NK cells) that are engineered to express a NY-ESO-1CAR, wherein the cancer cells express NY-ESO-1.

[0988] In one aspect, the present invention provides methods of treating cancer by providing to the subject in need thereof immune effector cells (e.g., T cells, NK cells) that are engineered to express a LAGE-1a CAR, wherein the cancer cells express LAGE-1a.

[0989] In one aspect, the present invention provides methods of treating cancer by providing to the subject in need thereof immune effector cells (e.g., T cells, NK cells) that are engineered to express a MAGE-A1CAR, wherein the cancer cells express MAGE-A1. In one embodiment, the cancer to be treated is melanoma.

[0990] In one aspect, the present invention provides methods of treating cancer by providing to the subject in need thereof immune effector cells (e.g., T cells, NK cells) that are engineered to express a MAGE A1CAR, wherein the cancer cells express MAGE A1.

[0991] In one aspect, the present invention provides methods of treating cancer by providing to the subject in need thereof immune effector cells (e.g., T cells, NK cells) that are engineered to express a ETV6-AML CAR, wherein the cancer cells express ETV6-AML.

[0992] In one aspect, the present invention provides methods of treating cancer by providing to the subject in need thereof immune effector cells (e.g., T cells, NK cells) that are engineered to express a sperm protein 17 CAR, wherein the cancer cells express sperm protein 17. In one embodiment, the cancer to be treated is ovarian cancer, HCC, or NSCLC.

[0993] In one aspect, the present invention provides methods of treating cancer by providing to the subject in need thereof immune effector cells (e.g., T cells, NK cells) that are engineered to express a XAGE1CAR, wherein the cancer cells express XAGE1. In one embodiment, the cancer to be treated is Ewings, or rhabdo cancer.

[0994] In one aspect, the present invention provides methods of treating cancer by providing to the subject in need thereof immune effector cells (e.g., T cells, NK cells) that are engineered to express a Tie 2 CAR, wherein the cancer cells express Tie 2. In one embodiment, the cancer to be treated is a solid tumor.

[0995] In one aspect, the present invention provides methods of treating cancer by providing to the subject in need thereof immune effector cells (e.g., T cells, NK cells) that are engineered to express a MAD-CT-1CAR, wherein the cancer cells express MAD-CT-1. In one embodiment, the cancer to be treated is prostate cancer, or melanoma.

[0996] In one aspect, the present invention provides methods of treating cancer by providing to the subject in need thereof immune effector cells (e.g., T cells, NK cells) that are engineered to express a MAD-CT-2CAR, wherein the cancer cells express MAD-CT-2. In one embodiment, the cancer to be treated is prostate cancer, melanoma.

[0997] In one aspect, the present invention provides methods of treating cancer by providing to the subject in need thereof immune effector cells (e.g., T cells, NK cells) that are engineered to express a Fos-related antigen 1 CAR, wherein the cancer cells express Fos-related antigen 1. In one embodiment, the cancer to be treated is glioma, squamous cell cancer, or pancreatic cancer.

[0998] In one aspect, the present invention provides methods of treating cancer by providing to the subject in need thereof immune effector cells (e.g., T cells, NK cells) that are engineered to express a p53CAR, wherein the cancer cells express p53.

[0999] In one aspect, the present invention provides methods of treating cancer by providing to the subject in need thereof immune effector cells (e.g., T cells, NK cells) that are engineered to express a prostein CAR, wherein the cancer cells express prostein.

[1000] In one aspect, the present invention provides methods of treating cancer by providing to the subject in need thereof immune effector cells (e.g., T cells, NK cells) that are engineered to express a survivin and telomerase CAR, wherein the cancer cells express survivin and telomerase.

[1001] In one aspect, the present invention provides methods of treating cancer by providing to the subject in need thereof immune effector cells (e.g., T cells, NK cells) that are engineered to express a PCTA-1/Galectin 8 CAR, wherein the cancer cells express PCTA-1/Galectin 8.

[1002] In one aspect, the present invention provides methods of treating cancer by providing to the subject in need thereof immune effector cells (e.g., T cells, NK cells) that are engineered to express a MelanA/MART1CAR, wherein the cancer cells express MelanA/MART1.

[1003] In one aspect, the present invention provides methods of treating cancer by providing to the subject in need thereof immune effector cells (e.g., T cells, NK cells) that are engineered to express a Ras mutant CAR, wherein the cancer cells express Ras mutant.

[1004] In one aspect, the present invention provides methods of treating cancer by providing to the subject in need thereof immune effector cells (e.g., T cells, NK cells) that are engineered to express a p53 mutant CAR, wherein the cancer cells express p53 mutant.

[1005] In one aspect, the present invention provides methods of treating cancer by providing to the subject in need thereof immune effector cells (e.g., T cells, NK cells) that are engineered to express a hTERT CAR, wherein the cancer cells express hTERT.

[1006] In one aspect, the present invention provides methods of treating cancer by providing to the subject in need thereof immune effector cells (e.g., T cells, NK cells) that are engineered to express a sarcoma translocation breakpoints CAR, wherein the cancer cells express sarcoma translocation breakpoints. In one embodiment, the cancer to be treated is sarcoma.

[1007] In one aspect, the present invention provides methods of treating cancer by providing to the subject in need thereof immune effector cells (e.g., T cells, NK cells) that are engineered to express a ML-IAP CAR, wherein the cancer cells express ML-IAP. In one embodiment, the cancer to be treated is melanoma.

[1008] In one aspect, the present invention provides methods of treating cancer by providing to the subject in need thereof immune effector cells (e.g., T cells, NK cells) that are engineered to express an ERGCAR, wherein the cancer cells express ERG (TMPRSS2 ETS fusion gene).

[1009] In one aspect, the present invention provides methods of treating cancer by providing to the subject in need thereof immune effector cells (e.g., T cells, NK cells) that are engineered to express a NA17CAR, wherein the cancer cells express NA17. In one embodiment, the cancer to be treated is melanoma.

[1010] In one aspect, the present invention provides methods of treating cancer by providing to the subject in need thereof immune effector cells (e.g., T cells, NK cells) that are engineered to express a PAX3CAR, wherein the cancer cells express PAX3. In one embodiment, the cancer to be treated is alveolar rhabdomyosarcoma.

[1011] In one aspect, the present invention provides methods of treating cancer by providing to the subject in need thereof immune effector cells (e.g., T cells, NK cells) that are engineered to express an androgen receptor CAR, wherein the cancer cells express androgen receptor. In one embodiment, the cancer to be treated is metastatic prostate cancer.

[1012] In one aspect, the present invention provides methods of treating cancer by providing to the subject in need thereof immune effector cells (e.g., T cells, NK cells) that are engineered to express a Cyclin B1CAR, wherein the cancer cells express Cyclin B1.

[1013] In one aspect, the present invention provides methods of treating cancer by providing to the subject in need thereof immune effector cells (e.g., T cells, NK cells) that are engineered to express a MYCNCAR, wherein the cancer cells express MYCN.

[1014] In one aspect, the present invention provides methods of treating cancer by providing to the subject in need thereof immune effector cells (e.g., T cells, NK cells) that are engineered to express a RhoC CAR, wherein the cancer cells express RhoC.

[1015] In one aspect, the present invention provides methods of treating cancer by providing to the subject in need thereof immune effector cells (e.g., T cells, NK cells) that are engineered to express a TRP-2CAR, wherein the cancer cells express TRP-2. In one embodiment, the cancer to be treated is melanoma.

[1016] In one aspect, the present invention provides methods of treating cancer by providing to the subject in need thereof immune effector cells (e.g., T cells, NK cells) that are engineered to express a CYP1B1CAR, wherein the cancer cells express CYP1B1. In one embodiment, the cancer to be treated is breast cancer, colon cancer, lung cancer, esophagus cancer, skin cancer, lymph node cancer, brain cancer, or testis cancer.

[1017] In one aspect, the present invention provides methods of treating cancer by providing to the subject in need thereof immune effector cells (e.g., T cells, NK cells) that are engineered to express a BORIS CAR, wherein the cancer cells express BORIS. In one embodiment, the cancer to be treated is lung cancer.

[1018] In one aspect, the present invention provides methods of treating cancer by providing to the subject in need thereof immune effector cells (e.g., T cells, NK cells) that are engineered to express a SART3CAR, wherein the cancer cells express SART3

[1019] In one aspect, the present invention provides methods of treating cancer by providing to the subject in need thereof immune effector cells (e.g., T cells, NK cells) that are engineered to express a PAX5CAR, wherein the cancer cells express PAX5.

[1020] In one aspect, the present invention provides methods of treating cancer by providing to the subject in need thereof immune effector cells (e.g., T cells, NK cells) that are engineered to express a OY-TES1CAR, wherein the cancer cells express OY-TES1.

[1021] In one aspect, the present invention provides methods of treating cancer by providing to the subject in need thereof immune effector cells (e.g., T cells, NK cells) that are engineered to express a LCK CAR, wherein the cancer cells express LCK.

[1022] In one aspect, the present invention provides methods of treating cancer by providing to the subject in need thereof immune effector cells (e.g., T cells, NK cells) that are engineered to express a AKAP-4CAR, wherein the cancer cells express AKAP-4.

[1023] In one aspect, the present invention provides methods of treating cancer by providing to the subject in need thereof immune effector cells (e.g., T cells, NK cells) that are engineered to express a SSX2CAR, wherein the cancer cells express SSX2.

[1024] In one aspect, the present invention provides methods of treating cancer by providing to the subject in need thereof immune effector cells (e.g., T cells, NK cells) that are engineered to express a RAGE-1CAR, wherein the cancer cells express RAGE-1. In one embodiment, the cancer to be treated is RCC (renal cell cancer), or other solid tumors

[1025] In one aspect, the present invention provides methods of treating cancer by providing to the subject in need thereof immune effector cells (e.g., T cells, NK cells) that are engineered to express a human telomerase reverse transcriptase CAR, wherein the cancer cells express human telomerase reverse transcriptase. In one embodiment, the cancer to be treated is solid tumors.

[1026] In one aspect, the present invention provides methods of treating cancer by providing to the subject in need thereof immune effector cells (e.g., T cells, NK cells) that are engineered to express a RU1CAR, wherein the cancer cells express RU1.

[1027] In one aspect, the present invention provides methods of treating cancer by providing to the subject in need thereof immune effector cells (e.g., T cells, NK cells) that are engineered to express a RU2CAR, wherein the cancer cells express RU2.

[1028] In one aspect, the present invention provides methods of treating cancer by providing to the subject in need thereof immune effector cells (e.g., T cells, NK cells) that are engineered to express an intestinal carboxyl esterase CAR, wherein the cancer cells express intestinal carboxyl esterase. In one embodiment, the cancer to be treated is thyroid cancer, RCC, CRC (colorectal cancer), breast cancer, or other solid tumors.

[1029] In one aspect, the present invention provides methods of treating cancer by providing to the subject in need thereof immune effector cells (e.g., T cells, NK cells) that are engineered to express a Prostase CAR, wherein the cancer cells express Prostase.

[1030] In one aspect, the present invention provides methods of treating cancer by providing to the subject in need thereof immune effector cells (e.g., T cells, NK cells) that are engineered to express a PAPCAR, wherein the cancer cells express PAP.

[1031] In one aspect, the present invention provides methods of treating cancer by providing to the subject in need thereof immune effector cells (e.g., T cells, NK cells) that are engineered to express an IGF-I receptor CAR, wherein the cancer cells express IGF-I receptor.

[1032] In one aspect, the present invention provides methods of treating cancer by providing to the subject in need thereof immune effector cells (e.g., T cells, NK cells) that are engineered to express a gp100 CAR, wherein the cancer cells express gp100.

[1033] In one aspect, the present invention provides methods of treating cancer by providing to the subject in need thereof immune effector cells (e.g., T cells, NK cells) that are engineered to express a bcr-abl CAR, wherein the cancer cells express bcr-abl.

[1034] In one aspect, the present invention provides methods of treating cancer by providing to the subject in need thereof immune effector cells (e.g., T cells, NK cells) that are engineered to express a tyrosinase CAR, wherein the cancer cells express tyrosinase.

[1035] In one aspect, the present invention provides methods of treating cancer by providing to the subject in need thereof immune effector cells (e.g., T cells, NK cells) that are engineered to express a Fucosyl GM1CAR, wherein the cancer cells express Fucosyl GM1.

[1036] In one aspect, the present invention provides methods of treating cancer by providing to the subject in need thereof immune effector cells (e.g., T cells, NK cells) that are engineered to express a mut hsp70-2CAR, wherein the cancer cells express mut hsp70-2. In one embodiment, the cancer to be treated is melanoma.

[1037] In one aspect, the present invention provides methods of treating cancer by providing to the subject in need thereof immune effector cells (e.g., T cells, NK cells) that are engineered to express a CD79a CAR, wherein the cancer cells express CD79a.

[1038] In one aspect, the present invention provides methods of treating cancer by providing to the subject in need thereof immune effector cells (e.g., T cells, NK cells) that are engineered to express a CD79b CAR, wherein the cancer cells express CD79b.

[1039] In one aspect, the present invention provides methods of treating cancer by providing to the subject in need thereof immune effector cells (e.g., T cells, NK cells) that are engineered to express a CD72 CAR, wherein the cancer cells express CD72.

[1040] In one aspect, the present invention provides methods of treating cancer by providing to the subject in need thereof immune effector cells (e.g., T cells, NK cells) that are engineered to express a LAIR1 CAR, wherein the cancer cells express LAIR1.

[1041] In one aspect, the present invention provides methods of treating cancer by providing to the subject in need thereof immune effector cells (e.g., T cells, NK cells) that are engineered to express a FCAR CAR, wherein the cancer cells express FCAR.

[1042] In one aspect, the present invention provides methods of treating cancer by providing to the subject in need thereof immune effector cells (e.g., T cells, NK cells) that are engineered to express a LILRA2 CAR, wherein the cancer cells express LILRA2.

[1043] In one aspect, the present invention provides methods of treating cancer by providing to the subject in need thereof immune effector cells (e.g., T cells, NK cells) that are engineered to express a CD300LF CAR, wherein the cancer cells express CD300LF.

[1044] In one aspect, the present invention provides methods of treating cancer by providing to the subject in need thereof immune effector cells (e.g., T cells, NK cells) that are engineered to express a CLEC12A CAR, wherein the cancer cells express CLEC12A.

[1045] In one aspect, the present invention provides methods of treating cancer by providing to the subject in need thereof immune effector cells (e.g., T cells, NK cells) that are engineered to express a BST2 CAR, wherein the cancer cells express BST2.

[1046] In one aspect, the present invention provides methods of treating cancer by providing to the subject in need thereof immune effector cells (e.g., T cells, NK cells) that are engineered to express an EMR2 CAR, wherein the cancer cells express EMR2.

[1047] In one aspect, the present invention provides methods of treating cancer by providing to the subject in need thereof immune effector cells (e.g., T cells, NK cells) that are engineered to express a LY75 CAR, wherein the cancer cells express LY75.

[1048] In one aspect, the present invention provides methods of treating cancer by providing to the subject in need thereof immune effector cells (e.g., T cells, NK cells) that are engineered to express a GPC3 CAR, wherein the cancer cells express GPC3.

[1049] In one aspect, the present invention provides methods of treating cancer by providing to the subject in need thereof immune effector cells (e.g., T cells, NK cells) that are engineered to express a FCRL5 CAR, wherein the cancer cells express FCRL5.

[1050] In one aspect, the present invention provides methods of treating cancer by providing to the subject in need thereof immune effector cells (e.g., T cells, NK cells) that are engineered to express an IGLL1 CAR, wherein the cancer cells express IGLL1.

[1051] In one aspect, the present invention relates to treatment of a subject in vivo using an PD1 CAR such that growth of cancerous tumors is inhibited. A PD1 CAR may be used alone to inhibit the growth of cancerous tumors. Alternatively, PD1 CAR may be used in conjunction with other CARs, immunogenic agents, standard cancer treatments, or other antibodies. In one embodiment, the subject is treated with a PD1 CAR and an XCAR described herein. In an embodiment, a PD1 CAR is used in conjunction with another CAR, e.g., a CAR described herein, and a kinase inhibitor, e.g., a kinase inhibitor described herein.

[1052] In another aspect, a method of treating a subject, e.g., reducing or ameliorating, a hyperproliferative condition or disorder (e.g., a cancer), e.g., solid tumor, a soft tissue tumor, or a metastatic lesion, in a subject is provided. As used herein, the term “cancer” is meant to include all types of cancerous growths or oncogenic processes, metastatic tissues or malignantly transformed cells, tissues, or organs, irrespective of histopathologic type or stage of invasiveness. Examples of solid tumors include malignancies, e.g., sarcomas, adenocarcinomas, and carcinomas, of the various organ systems, such as those affecting liver, lung, breast, lymphoid, gastrointestinal (e.g., colon), genitourinary tract (e.g., renal, urothelial cells), prostate and pharynx. Adenocarcinomas include malignancies such as most colon cancers, rectal cancer, renal-cell carcinoma, liver cancer, non-small cell carcinoma of the lung, cancer of the small intestine and cancer of the esophagus. In one embodiment, the cancer is a melanoma, e.g., an advanced stage melanoma. Metastatic lesions of the aforementioned cancers can also be treated or prevented using the methods and compositions of the invention. Examples of other cancers that can be treated include bone cancer, pancreatic cancer, skin cancer, cancer of the head or neck, cutaneous or intraocular malignant melanoma, uterine cancer, ovarian cancer, rectal cancer, cancer of the anal region, stomach cancer, testicular cancer, uterine cancer, carcinoma of the fallopian tubes, carcinoma of the endometrium, carcinoma of the cervix, carcinoma of the vagina, carcinoma of the vulva, Hodgkin Disease, non-Hodgkin lymphoma, cancer of the esophagus, cancer of the small intestine, cancer of the endocrine system, cancer of the thyroid gland, cancer of the parathyroid gland, cancer of the adrenal gland, sarcoma of soft tissue, cancer of the urethra, cancer of the penis, chronic or acute leukemias including acute myeloid leukemia, chronic myeloid leukemia, acute lymphoblastic leukemia, chronic lymphocytic leukemia, solid tumors of childhood, lymphocytic lymphoma, cancer of the bladder, cancer of the kidney or ureter, carcinoma of the renal pelvis, neoplasm of the central nervous system (CNS), primary CNS lymphoma, tumor angiogenesis, spinal axis tumor, brain stem glioma, pituitary adenoma, Kaposi's sarcoma, epidermoid cancer, squamous cell cancer, T-cell lymphoma, environmentally induced cancers including those induced by asbestos, and combinations of said cancers. Treatment of metastatic cancers, e.g., metastatic cancers that express PD-L1 (Iwai et al. (2005) Int. Immunol. 17:133-144) can be effected using the antibody molecules described herein.

[1053] Exemplary cancers whose growth can be inhibited include cancers typically responsive to immunotherapy. Non-limiting examples of cancers for treatment include melanoma (e.g., metastatic malignant melanoma), renal cancer (e.g. clear cell carcinoma), prostate cancer (e.g. hormone refractory prostate adenocarcinoma), breast cancer, colon cancer and lung cancer (e.g. non-small cell lung cancer). Additionally, refractory or recurrent malignancies can be treated using the molecules described herein.

[1054] In one aspect, the invention pertains to a vector comprising a CAR operably linked to promoter for expression in mammalian immune effector cells (e.g., T cells, NK cells). In one aspect, the invention provides a recombinant immune effector cell expressing a CAR of the present invention for use in treating cancer expressing a cancer associate antigen as described herein. In one aspect, CAR-expressing cells of the invention is capable of contacting a tumor cell with at least one cancer associated antigen expressed on its surface such that the CAR-expressing cell targets the cancer cell and growth of the cancer is inhibited.

[1055] In one aspect, the invention pertains to a method of inhibiting growth of a cancer, comprising contacting the cancer cell with a CAR-expressing cell of the present invention such that the CART is activated in response to the antigen and targets the cancer cell, wherein the growth of the tumor is inhibited.

[1056] In one aspect, the invention pertains to a method of treating cancer in a subject. The method comprises administering to the subject CAR-expressing cell of the present invention such that the cancer is treated in the subject. In one aspect, the cancer associated with expression of a cancer associate antigen as described herein is a hematological cancer. In one aspect, the hematological cancer is a leukemia or a lymphoma. In one aspect, a cancer associated with expression of a cancer associate antigen as described herein includes cancers and malignancies including, but not limited to, e.g., one or more acute leukemias including but not limited to, e.g., B-cell acute Lymphoid Leukemia (“BALL”), T-cell acute Lymphoid Leukemia (“TALL”), acute lymphoid leukemia (ALL); one or more chronic leukemias including but not limited to, e.g., chronic myelogenous leukemia (CML), Chronic Lymphoid Leukemia (CLL). Additional cancers or hematologic conditions associated with expression of a cancer associate antigen as described herein include, but are not limited to, e.g., B cell prolymphocytic leukemia, blastic plasmacytoid dendritic cell neoplasm, Burkitt's lymphoma, diffuse large B cell lymphoma, Follicular lymphoma, Hairy cell leukemia, small cell- or a large cell-follicular lymphoma, malignant lymphoproliferative conditions, MALT lymphoma, mantle cell lymphoma, Marginal zone lymphoma, multiple myeloma, myelodysplasia and myelodysplastic syndrome, non-Hodgkin lymphoma, plasmablastic lymphoma, plasmacytoid dendritic cell neoplasm, Waldenstrom macroglobulinemia, and “preleukemia” which are a diverse collection of hematological conditions united by ineffective production (or dysplasia) of myeloid blood cells, and the like. Further a disease associated with a cancer associate antigen as described herein expression include, but not limited to, e.g., atypical and/or non-classical cancers, malignancies, precancerous conditions or proliferative diseases associated with expression of a cancer associate antigen as described herein.

[1057] In some embodiments, a cancer that can be treated with CAR-expressing cell of the present invention is multiple myeloma. Multiple myeloma is a cancer of the blood, characterized by accumulation of a plasma cell clone in the bone marrow. Current therapies for multiple myeloma include, but are not limited to, treatment with lenalidomide, which is an analog of thalidomide. Lenalidomide has activities which include anti-tumor activity, angiogenesis inhibition, and immunomodulation. Generally, myeloma cells are thought to be negative for a cancer associate antigen as described herein expression by flow cytometry. Thus, in some embodiments, a CD19 CAR, e.g., as described herein, may be used to target myeloma cells. In some embodiments, cars of the present invention therapy can be used in combination with one or more additional therapies, e.g., lenalidomide treatment.

[1058] The invention includes a type of cellular therapy where immune effector cells (e.g., T cells, NK cells) are genetically modified to express a chimeric antigen receptor (CAR) and the CAR-expressing T cell or NK cell is infused to a recipient in need thereof. The infused cell is able to kill tumor cells in the recipient. Unlike antibody therapies, CAR-modified immune effector cells (e.g., T cells, NK cells) are able to replicate in vivo resulting in long-term persistence that can lead to sustained tumor control. In various aspects, the immune effector cells (e.g., T cells, NK cells) administered to the patient, or their progeny, persist in the patient for at least four months, five months, six months, seven months, eight months, nine months, ten months, eleven months, twelve months, thirteen months, fourteen month, fifteen months, sixteen months, seventeen months, eighteen months, nineteen months, twenty months, twenty-one months, twenty-two months, twenty-three months, two years, three years, four years, or five years after administration of the T cell or NK cell to the patient.

[1059] The invention also includes a type of cellular therapy where immune effector cells (e.g., T cells, NK cells) are modified, e.g., by in vitro transcribed RNA, to transiently express a chimeric antigen receptor (CAR) and the CAR T cell or NK cell is infused to a recipient in need thereof. The infused cell is able to kill tumor cells in the recipient. Thus, in various aspects, the immune effector cells (e.g., T cells, NK cells) administered to the patient, is present for less than one month, e.g., three weeks, two weeks, one week, after administration of the T cell or NK cell to the patient.

[1060] Without wishing to be bound by any particular theory, the anti-tumor immunity response elicited by the CAR-modified immune effector cells (e.g., T cells, NK cells) may be an active or a passive immune response, or alternatively may be due to a direct vs indirect immune response. In one aspect, the CAR transduced immune effector cells (e.g., T cells, NK cells) exhibit specific proinflammatory cytokine secretion and potent cytolytic activity in response to human cancer cells expressing the a cancer associate antigen as described herein, resist soluble a cancer associate antigen as described herein inhibition, mediate bystander killing and mediate regression of an established human tumor. For example, antigen-less tumor cells within a heterogeneous field of a cancer associate antigen as described herein-expressing tumor may be susceptible to indirect destruction by a cancer associate antigen as described herein-redirected immune effector cells (e.g., T cells, NK cells) that has previously reacted against adjacent antigen-positive cancer cells.

[1061] In one aspect, the fully-human CAR-modified immune effector cells (e.g., T cells, NK cells) of the invention may be a type of vaccine for ex vivo immunization and/or in vivo therapy in a mammal. In one aspect, the mammal is a human.

[1062] With respect to ex vivo immunization, at least one of the following occurs in vitro prior to administering the cell into a mammal: i) expansion of the cells, ii) introducing a nucleic acid encoding a CAR to the cells or iii) cryopreservation of the cells.

[1063] Ex vivo procedures are well known in the art and are discussed more fully below. Briefly, cells are isolated from a mammal (e.g., a human) and genetically modified (i.e., transduced or transfected in vitro) with a vector expressing a CAR disclosed herein. The CAR-modified cell can be administered to a mammalian recipient to provide a therapeutic benefit. The mammalian recipient may be a human and the CAR-modified cell can be autologous with respect to the recipient. Alternatively, the cells can be allogeneic, syngeneic or xenogeneic with respect to the recipient.

[1064] The procedure for ex vivo expansion of hematopoietic stem and progenitor cells is described in U.S. Pat. No. 5,199,942, incorporated herein by reference, can be applied to the cells of the present invention. Other suitable methods are known in the art, therefore the present invention is not limited to any particular method of ex vivo expansion of the cells. Briefly, ex vivo culture and expansion of immune effector cells (e.g., T cells, NK cells) comprises: (1) collecting CD34+ hematopoietic stem and progenitor cells from a mammal from peripheral blood harvest or bone marrow explants; and (2) expanding such cells ex vivo. In addition to the cellular growth factors described in U.S. Pat. No. 5,199,942, other factors such as flt3-L, IL-1, IL-3 and c-kit ligand, can be used for culturing and expansion of the cells.

[1065] In addition to using a cell-based vaccine in terms of ex vivo immunization, the present invention also provides compositions and methods for in vivo immunization to elicit an immune response directed against an antigen in a patient.

[1066] Generally, the cells activated and expanded as described herein may be utilized in the treatment and prevention of diseases that arise in individuals who are immunocompromised. In particular, the CAR-modified immune effector cells (e.g., T cells, NK cells) of the invention are used in the treatment of diseases, disorders and conditions associated with expression of a cancer associate antigen as described herein. In certain aspects, the cells of the invention are used in the treatment of patients at risk for developing diseases, disorders and conditions associated with expression of a cancer associate antigen as described herein. Thus, the present invention provides methods for the treatment or prevention of diseases, disorders and conditions associated with expression of a cancer associate antigen as described herein comprising administering to a subject in need thereof, a therapeutically effective amount of the CAR-modified immune effector cells (e.g., T cells, NK cells) of the invention.

[1067] In one aspect the CAR-expressing cells of the inventions may be used to treat a proliferative disease such as a cancer or malignancy or is a precancerous condition such as a myelodysplasia, a myelodysplastic syndrome or a preleukemia. Further a disease associated with a cancer associate antigen as described herein expression include, but not limited to, e.g., atypical and/or non-classical cancers, malignancies, precancerous conditions or proliferative diseases expressing a cancer associated antigen as described herein. Non-cancer related indications associated with expression of a cancer associate antigen as described herein include, but are not limited to, e.g., autoimmune disease, (e.g., lupus), inflammatory disorders (allergy and asthma) and transplantation.

[1068] The CAR-modified immune effector cells (e.g., T cells, NK cells) of the present invention may be administered either alone, or as a pharmaceutical composition in combination with diluents and/or with other components such as IL-2 or other cytokines or cell populations.

### Hematologic Cancer

[1069] Hematological cancer conditions are the types of cancer such as leukemia, lymphoma, and malignant lymphoproliferative conditions that affect blood, bone marrow and the lymphatic system.

[1070] Leukemia can be classified as acute leukemia and chronic leukemia. Acute leukemia can be further classified as acute myelogenous leukemia (AML) and acute lymphoid leukemia (ALL). Chronic leukemia includes chronic myelogenous leukemia (CML) and chronic lymphoid leukemia (CLL). Other related conditions include myelodysplastic syndromes (MDS, formerly known as “preleukemia”) which are a diverse collection of hematological conditions united by ineffective production (or dysplasia) of myeloid blood cells and risk of transformation to AML.

[1071] Lymphoma is a group of blood cell tumors that develop from lymphocytes. Exemplary lymphomas include non-Hodgkin lymphoma and Hodgkin lymphoma.

[1072] The present invention provides for compositions and methods for treating cancer. In one aspect, the cancer is a hematologic cancer including but is not limited to hematological cancer is a leukemia or a lymphoma. In one aspect, the CAR-expressing cells of the invention may be used to treat cancers and malignancies such as, but not limited to, e.g., acute leukemias including but not limited to, e.g., B-cell acute lymphoid leukemia (“BALL”), T-cell acute lymphoid leukemia (“TALL”), acute lymphoid leukemia (ALL); one or more chronic leukemias including but not limited to, e.g., chronic myelogenous leukemia (CML), chronic lymphocytic leukemia (CLL); additional hematologic cancers or hematologic conditions including, but not limited to, e.g., B cell prolymphocytic leukemia, blastic plasmacytoid dendritic cell neoplasm, Burkitt's lymphoma, diffuse large B cell lymphoma, Follicular lymphoma, Hairy cell leukemia, small cell- or a large cell-follicular lymphoma, malignant lymphoproliferative conditions, MALT lymphoma, mantle cell lymphoma, Marginal zone lymphoma, multiple myeloma, myelodysplasia and myelodysplastic syndrome, non-Hodgkin lymphoma, plasmablastic lymphoma, plasmacytoid dendritic cell neoplasm, Waldenstrom macroglobulinemia, and “preleukemia” which are a diverse collection of hematological conditions united by ineffective production (or dysplasia) of myeloid blood cells, and the like. Further a disease associated with a cancer associate antigen as described herein expression includes, but not limited to, e.g., atypical and/or non-classical cancers, malignancies, precancerous conditions or proliferative diseases expressing a cancer associate antigen as described herein.

[1073] The present invention also provides methods for inhibiting the proliferation or reducing a cancer associated antigen as described herein-expressing cell population, the methods comprising contacting a population of cells comprising a cancer associated antigen as described herein-expressing cell with a CAR-expressing T cell or NK cell of the invention that binds to the a cancer associate antigen as described herein-expressing cell. In a specific aspect, the present invention provides methods for inhibiting the proliferation or reducing the population of cancer cells expressing a cancer associated antigen as described herein, the methods comprising contacting a cancer associate antigen as described herein-expressing cancer cell population with a CAR-expressing T cell or NK cell of the invention that binds to a cancer associated antigen as described herein-expressing cell. In one aspect, the present invention provides methods for inhibiting the proliferation or reducing the population of cancer cells expressing a cancer associated antigen as described herein, the methods comprising contacting a cancer associated antigen as described herein-expressing cancer cell population with a CAR-expressing T cell or NK cell of the invention that binds to a cancer associated antigen as described herein-expressing cell. In certain aspects, a CAR-expressing T cell or NK cell of the invention reduces the quantity, number, amount or percentage of cells and/or cancer cells by at least 25%, at least 30%, at least 40%, at least 50%, at least 65%, at least 75%, at least 85%, at least 95%, or at least 99% in a subject with or animal model for myeloid leukemia or another cancer associated with a cancer associated antigen as described herein-expressing cells relative to a negative control. In one aspect, the subject is a human.

[1074] The present invention also provides methods for preventing, treating and/or managing a disease associated with a cancer associated antigen as described herein-expressing cells (e.g., a hematologic cancer or atypical cancer expressing a cancer associated antigen as described herein), the methods comprising administering to a subject in need a CAR T cell or NK cell of the invention that binds to a cancer associated antigen as described herein-expressing cell. In one aspect, the subject is a human. Non-limiting examples of disorders associated with a cancer associated antigen as described herein-expressing cells include autoimmune disorders (such as lupus), inflammatory disorders (such as allergies and asthma) and cancers (such as hematological cancers or atypical cancers expressing a cancer associated antigen as described herein).

[1075] The present invention also provides methods for preventing, treating and/or managing a disease associated with a cancer associated antigen as described herein-expressing cells, the methods comprising administering to a subject in need a CAR T cell or NK cell of the invention that binds to a cancer associated antigen as described herein-expressing cell. In one aspect, the subject is a human.

[1076] The present invention provides methods for preventing relapse of cancer associated with a cancer associated antigen as described herein-expressing cells, the methods comprising administering to a subject in need thereof a CAR T cell or NK cell of the invention that binds to a cancer associated antigen as described herein-expressing cell. In one aspect, the methods comprise administering to the subject in need thereof an effective amount of a CAR-expressing T cell or NK cell described herein that binds to a cancer associated antigen as described herein-expressing cell in combination with an effective amount of another therapy.

### Combination Therapies

[1077] A CAR-expressing cell described herein may be used in combination with other known agents and therapies. Administered “in combination”, as used herein, means that two (or more) different treatments are delivered to the subject during the course of the subject's affliction with the disorder, e.g., the two or more treatments are delivered after the subject has been diagnosed with the disorder and before the disorder has been cured or eliminated or treatment has ceased for other reasons. In some embodiments, the delivery of one treatment is still occurring when the delivery of the second begins, so that there is overlap in terms of administration. This is sometimes referred to herein as “simultaneous” or “concurrent delivery”. In other embodiments, the delivery of one treatment ends before the delivery of the other treatment begins. In some embodiments of either case, the treatment is more effective because of combined administration. For example, the second treatment is more effective, e.g., an equivalent effect is seen with less of the second treatment, or the second treatment reduces symptoms to a greater extent, than would be seen if the second treatment were administered in the absence of the first treatment, or the analogous situation is seen with the first treatment. In some embodiments, delivery is such that the reduction in a symptom, or other parameter related to the disorder is greater than what would be observed with one treatment delivered in the absence of the other. The effect of the two treatments can be partially additive, wholly additive, or greater than additive. The delivery can be such that an effect of the first treatment delivered is still detectable when the second is delivered.

[1078] A CAR-expressing cell described herein and the at least one additional therapeutic agent can be administered simultaneously, in the same or in separate compositions, or sequentially. For sequential administration, the CAR-expressing cell described herein can be administered first, and the additional agent can be administered second, or the order of administration can be reversed.

[1079] The CAR therapy and/or other therapeutic agents, procedures or modalities can be administered during periods of active disorder, or during a period of remission or less active disease. The CAR therapy can be administered before the other treatment, concurrently with the treatment, post-treatment, or during remission of the disorder.

[1080] When administered in combination, the CAR therapy and the additional agent (e.g., second or third agent), or all, can be administered in an amount or dose that is higher, lower or the same than the amount or dosage of each agent used individually, e.g., as a monotherapy. In certain embodiments, the administered amount or dosage of the CAR therapy, the additional agent (e.g., second or third agent), or all, is lower (e.g., at least 20%, at least 30%, at least 40%, or at least 50%) than the amount or dosage of each agent used individually, e.g., as a monotherapy. In other embodiments, the amount or dosage of the CAR therapy, the additional agent (e.g., second or third agent), or all, that results in a desired effect (e.g., treatment of cancer) is lower (e.g., at least 20%, at least 30%, at least 40%, or at least 50% lower) than the amount or dosage of each agent used individually, e.g., as a monotherapy, required to achieve the same therapeutic effect.

[1081] In certain embodiments of the methods or uses described herein, the CAR molecule is administered in combination with an agent that increases the efficacy of the immune effector cell, e.g., one or more of a protein phosphatase inhibitor, a kinase inhibitor, a cytokine, an inhibitor of an immune inhibitory molecule; or an agent that decreases the level or activity of a TREG cell.

[1082] In certain embodiments of the methods or uses described herein, the protein phosphatase inhibitor is an SHP-1 inhibitor and/or an SHP-2 inhibitor.

[1083] In other embodiments of the methods or uses described herein, kinase inhibitor is chosen from one or more of a CDK4 inhibitor, a CDK4/6 inhibitor (e.g., palbociclib), a BTK inhibitor (e.g., ibrutinib or RN-486), an mTOR inhibitor (e.g., rapamycin or everolimus (RAD001)), an MNK inhibitor, or a dual P13K/mTOR inhibitor. In one embodiment, the BTK inhibitor does not reduce or inhibit the kinase activity of interleukin-2-inducible kinase (ITK).

[1084] In other embodiments of the methods or uses described herein, the agent that inhibits the immune inhibitory molecule comprises an antibody or antibody fragment, an inhibitory nucleic acid, a clustered regularly interspaced short palindromic repeats (CRISPR), a transcription-activator like effector nuclease (TALEN), or a zinc finger endonuclease (ZFN) that inhibits the expression of the inhibitory molecule.

[1085] In other embodiments of the methods or uses described herein, the agent that decreases the level or activity of the TREG cells is chosen from cyclophosphamide, anti-GITR antibody, CD25-depletion, or a combination thereof.

[1086] In certain embodiments of the methods or uses described herein, the immune inhibitory molecule is selected from the group consisting of PD1, PD-L1, CTLA-4, TIM-3, LAG-3, VISTA, BTLA, TIGIT, LAIR1, CD160, 2B4, TGF beta, CEACAM-1, CEACAM-3, and CEACAM-5.

[1087] In other embodiments, the agent that inhibits the inhibitory molecule comprises a first polypeptide comprising an inhibitory molecule or a fragment thereof and a second polypeptide that provides a positive signal to the cell, and wherein the first and second polypeptides are expressed on the CAR-containing immune cells, wherein (i) the first polypeptide comprises PD1, PD-L1, CTLA-4, TIM-3, LAG3, VISTA, BTLA, TIGIT, LAIR1, CD160, 2B4, TGF beta, CEACAM-1, CEACAM-3, and CEACAM-5 or a fragment thereof; and/or (ii) the second polypeptide comprises an intracellular signaling domain comprising a primary signaling domain and/or a costimulatory signaling domain. In one embodiment, the primary signaling domain comprises a functional domain of CD3 zeta; and/or the costimulatory signaling domain comprises a functional domain of a protein selected from 41BB, CD27 and CD28, or a functional variant thereof.

[1088] In other embodiments, cytokine is chosen from IL-7, IL-15 or IL-21, or both.

[1089] In other embodiments, the immune effector cell comprising the CAR molecule and a second, e.g., any of the combination therapies disclosed herein (e.g., the agent that that increases the efficacy of the immune effector cell) are administered substantially simultaneously or sequentially.

[1090] In other embodiments, the immune cell comprising the CAR molecule is administered in combination with a molecule that targets GITR and/or modulates GITR function. In certain embodiments, the molecule targeting GITR and/or modulating GITR function is administered prior to the CAR-expressing cell or population of cells, or prior to apheresis.

[1091] In one embodiment, lymphocyte infusion, for example allogeneic lymphocyte infusion, is used in the treatment of the cancer, wherein the lymphocyte infusion comprises at least one CAR-expressing cell of the present invention. In one embodiment, autologous lymphocyte infusion is used in the treatment of the cancer, wherein the autologous lymphocyte infusion comprises at least one CAR-expressing cell described herein.

[1092] In one embodiment, the cell is a T cell and the T cell is diacylglycerol kinase (DGK) deficient. In one embodiment, the cell is a T cell and the T cell is Ikaros deficient. In one embodiment, the cell is a T cell and the T cell is both DGK and Ikaros deficient.

[1093] In one embodiment, the method includes administering a cell expressing the CAR molecule in combination with an agent which enhances the activity of a CAR-expressing cell, wherein the agent is a cytokine, e.g., IL-7, IL-15, IL-21, or a combination thereof. The cytokine can be delivered in combination with, e.g., simultaneously or shortly after, administration of the CAR-expressing cell. Alternatively, the cytokine can be delivered after a prolonged period of time after administration of the CAR-expressing cell, e.g., after assessment of the subject's response to the CAR-expressing cell. In one embodiment the cytokine is administered to the subject simultaneously (e.g., administered on the same day) with or shortly after administration (e.g., administered 1 day, 2 days, 3 days, 4 days, 5 days, 6 days, or 7 days after administration) of the cell or population of cells of any of claims 61-80. In other embodiments, the cytokine is administered to the subject after a prolonged period of time (e.g., e.g., at least 2 weeks, 3 weeks, 4 weeks, 6 weeks, 8 weeks, 10 weeks, or more) after administration of the cell or population of cells of any of claims 61-80, or after assessment of the subject's response to the cell.

[1094] In other embodiments, the cells expressing a CAR molecule are administered in combination with an agent that ameliorates one or more side effects associated with administration of a cell expressing a CAR molecule. Side effects associated with the CAR-expressing cell can be chosen from cytokine release syndrome (CRS) or hemophagocytic lymphohistiocytosis (HLH).

[1095] In embodiments of any of the aforesaid methods or uses, the cells expressing the CAR molecule are administered in combination with an agent that treats the disease associated with expression of the tumor antigen, e.g., any of the second or third therapies disclosed herein. Additional exemplary combinations include one or more of the following.

[1096] In another embodiment, the cell expressing the CAR molecule, e.g., as described herein, can be administered in combination with another agent, e.g., a kinase inhibitor and/or checkpoint inhibitor described herein. In an embodiment, a cell expressing the CAR molecule can further express another agent, e.g., an agent which enhances the activity of a CAR-expressing cell.

[1097] For example, in one embodiment, the agent that enhances the activity of a CAR-expressing cell can be an agent which inhibits an inhibitory molecule (e.g., an immune inhibitor molecule). Examples of inhibitory molecules include PD1, PD-L1, CTLA-4, TIM-3, CEACAM (e.g., CEACAM-1, CEACAM-3 and/or CEACAM-5), LAG-3, VISTA, BTLA, TIGIT, LAIR1, CD160, 2B4 and TGF beta.

[1098] In one embodiment, the agent that inhibits the inhibitory molecule is an inhibitory nucleic acid is a dsRNA, a siRNA, or a shRNA. In embodiments, the inhibitory nucleic acid is linked to the nucleic acid that encodes a component of the CAR molecule. For example, the inhibitory molecule can be expressed on the CAR-expressing cell.

[1099] In another embodiment, the agent which inhibits an inhibitory molecule, e.g., is a molecule described herein, e.g., an agent that comprises a first polypeptide, e.g., an inhibitory molecule, associated with a second polypeptide that provides a positive signal to the cell, e.g., an intracellular signaling domain described herein. In one embodiment, the agent comprises a first polypeptide, e.g., of an inhibitory molecule such as PD-1, PD-L1, CTLA-4, TIM-3, CEACAM (e.g., CEACAM-1, CEACAM-3 and/or CEACAM-5), LAG-3, VISTA, BTLA, TIGIT, LAIR1, CD160, 2B4 or TGF beta, or a fragment of any of these (e.g., at least a portion of the extracellular domain of any of these), and a second polypeptide which is an intracellular signaling domain described herein (e.g., comprising a costimulatory domain (e.g., 41BB, CD27 or CD28, e.g., as described herein) and/or a primary signaling domain (e.g., a CD3 zeta signaling domain described herein). In one embodiment, the agent comprises a first polypeptide of PD1 or a fragment thereof (e.g., at least a portion of the extracellular domain of PD1), and a second polypeptide of an intracellular signaling domain described herein (e.g., a CD28 signaling domain described herein and/or a CD3 zeta signaling domain described herein).

[1100] In one embodiment, the CAR-expressing immune effector cell of the present invention, e.g., T cell or NK cell, is administered to a subject that has received a previous stem cell transplantation, e.g., autologous stem cell transplantation.

[1101] In one embodiment, the CAR-expressing immune effector cell of the present invention, e.g., T cell or NK cells, is administered to a subject that has received a previous dose of melphalan.

[1102] In one embodiment, the cell expressing a CAR molecule, e.g., a CAR molecule described herein, is administered in combination with an agent that increases the efficacy of a cell expressing a CAR molecule, e.g., an agent described herein.

[1103] In one embodiment, the cells expressing a CAR molecule are administered in combination with a low, immune enhancing dose of an mTOR inhibitor. While not wishing to be bound by theory, it is believed that treatment with a low, immune enhancing, dose (e.g., a dose that is insufficient to completely suppress the immune system but sufficient to improve immune function) is accompanied by a decrease in PD-1 positive T cells or an increase in PD-1 negative cells. PD-1 positive T cells, but not PD-1 negative T cells, can be exhausted by engagement with cells which express a PD-1 ligand, e.g., PD-L1 or PD-L2.

[1104] In an embodiment this approach can be used to optimize the performance of CAR cells described herein in the subject. While not wishing to be bound by theory, it is believed that, in an embodiment, the performance of endogenous, non-modified immune effector cells, e.g., T cells or NK cells, is improved. While not wishing to be bound by theory, it is believed that, in an embodiment, the performance of a target antigen CAR-expressing cell is improved. In other embodiments, cells, e.g., T cells or NK cells, which have, or will be engineered to express a CAR, can be treated ex vivo by contact with an amount of an mTOR inhibitor that increases the number of PD1 negative immune effector cells, e.g., T cells or increases the ratio of PD1 negative immune effector cells, e.g., T cells/PD1 positive immune effector cells, e.g., T cells.

[1105] In an embodiment, administration of a low, immune enhancing, dose of an mTOR inhibitor, e.g., an allosteric inhibitor, e.g., RAD001, or a catalytic inhibitor, is initiated prior to administration of an CAR expressing cell described herein, e.g., T cells or NK cells. In an embodiment, the CAR cells are administered after a sufficient time, or sufficient dosing, of an mTOR inhibitor, such that the level of PD1 negative immune effector cells, e.g., T cells or NK cells, or the ratio of PD1 negative immune effector cells, e.g., T cells/PD1 positive immune effector cells, e.g., T cells, has been, at least transiently, increased.

[1106] In an embodiment, the cell, e.g., T cell or NK cell, to be engineered to express a CAR, is harvested after a sufficient time, or after sufficient dosing of the low, immune enhancing, dose of an mTOR inhibitor, such that the level of PD1 negative immune effector cells, e.g., T cells, or the ratio of PD1 negative immune effector cells, e.g., T cells/PD1 positive immune effector cells, e.g., T cells, in the subject or harvested from the subject has been, at least transiently, increased.

[1107] In one embodiment, the cell expressing a CAR molecule is administered in combination with an agent that ameliorates one or more side effect associated with administration of a cell expressing a CAR molecule, e.g., an agent described herein.

[1108] In one embodiment, the cell expressing a CAR molecule is administered in combination with an agent that treats the disease associated with a cancer associated antigen as described herein, e.g., an agent described herein.

[1109] In one embodiment, a cell expressing two or more CAR molecules, e.g., as described herein, is administered to a subject in need thereof to treat cancer. In one embodiment, a population of cells including a CAR expressing cell, e.g., as described herein, is administered to a subject in need thereof to treat cancer.

[1110] In one embodiment, the cell expressing a CAR molecule, is administered at a dose and/or dosing schedule described herein.

[1111] In one embodiment, the CAR molecule is introduced into immune effector cells (e.g., T cells, NK cells), e.g., using in vitro transcription, and the subject (e.g., human) receives an initial administration of cells comprising a CAR molecule and one or more subsequent administrations of cells comprising a CAR molecule wherein the one or more subsequent administrations are administered less than 15 days, e.g., 14, 13, 12, 11, 10, 9, 8, 7, 6, 5, 4, 3, or 2 days after the previous administration. In one embodiment, more than one administration of cells comprising a CAR molecule are administered to the subject (e.g., human) per week, e.g., 2, 3, or 4 administrations of cells comprising a CAR molecule are administered per week. In one embodiment, the subject (e.g., human subject) receives more than one administration of cells comprising a CAR molecule per week (e.g., 2, 3 or 4 administrations per week) (also referred to herein as a cycle), followed by a week of no administration of cells comprising a CAR molecule and then one or more additional administration of cells comprising a CAR molecule (e.g., more than one administration of the cells comprising a CAR molecule per week) is administered to the subject. In another embodiment, the subject (e.g., human subject) receives more than one cycle of cells comprising a CAR molecule, and the time between each cycle is less than 10, 9, 8, 7, 6, 5, 4, or 3 days. In one embodiment, the cells comprising a CAR molecule are administered every other day for 3 administrations per week. In one embodiment, the cells comprising a CAR molecule are administered for at least two, three, four, five, six, seven, eight or more weeks.

[1112] In one embodiment, the cells expressing a CAR molecule are administered as a first line treatment for the disease, e.g., the cancer, e.g., the cancer described herein. In another embodiment, the cells expressing a CAR molecule are administered as a second, third, fourth line treatment for the disease, e.g., the cancer, e.g., the cancer described herein.

[1113] In one embodiment, a population of cells described herein is administered.

[1114] In another aspect, the invention pertains to the isolated nucleic acid molecule encoding a CAR of the invention, the isolated polypeptide molecule of a CAR of the invention, the vector comprising a CAR of the invention, and the cell comprising a CAR of the invention for use as a medicament.

[1115] In another aspect, the invention pertains to a the isolated nucleic acid molecule encoding a CAR of the invention, the isolated polypeptide molecule of a CAR of the invention, the vector comprising a CAR of the invention, and the cell comprising a CAR of the invention for use in the treatment of a disease expressing a cancer associated antigen as described herein.

[1116] In another aspect, the invention pertains to a cell expressing a CAR molecule for use as a medicament in combination with a cytokine, e.g., IL-7, IL-15 and/or IL-21 as described herein. In another aspect, the invention pertains to a cytokine described herein for use as a medicament in combination with a cell expressing a CAR molecule described herein.

[1117] In another aspect, the invention pertains to a cell expressing a CAR molecule for use as a medicament in combination with a kinase inhibitor and/or a checkpoint inhibitor as described herein. In another aspect, the invention pertains to a kinase inhibitor and/or a checkpoint inhibitor described herein for use as a medicament in combination with a cell expressing a CAR molecule described herein.

[1118] In another aspect, the invention pertains to a cell expressing a CAR molecule for use in combination with a cytokine, e.g., IL-7, IL-15 and/or IL-21 as described herein, in the treatment of a disease expressing a tumor antigen targeted by the CAR. In another aspect, the invention pertains to a cytokine described herein for use in combination with a cell expressing a CAR molecule described herein, in the treatment of a disease expressing a tumor antigen targeted by the CAR.

[1119] In another aspect, the invention pertains to a cell expressing a CAR molecule for use in combination with a kinase inhibitor and/or a checkpoint inhibitor as described herein, in the treatment of a disease expressing a tumor antigen targeted by the CAR. In another aspect, the invention pertains to a kinase inhibitor and/or a checkpoint inhibitor described herein for use in combination with a cell expressing a CAR molecule described herein, in the treatment of a disease expressing a tumor antigen targeted by the CAR.

[1120] In another aspect, the present invention provides a method comprising administering a CAR molecule or a cell comprising a nucleic acid encoding a CAR molecule. In one embodiment, the subject has a disorder described herein, e.g., the subject has cancer, e.g., the subject has a cancer and has tumor-supporting cells which express a tumor-supporting antigen described herein. In one embodiment, the subject is a human.

[1121] In another aspect, the invention pertains to a method of treating a subject having a disease associated with expression of a tumor-supporting antigen as described herein comprising administering to the subject an effective amount of a cell comprising a CAR molecule.

[1122] In yet another aspect, the invention features a method of treating a subject having a disease associated with expression of a tumor-supporting antigen, comprising administering to the subject an effective amount of a cell, e.g., an immune effector cell (e.g., a population of immune effector cells) comprising a CAR molecule, wherein the CAR molecule comprises an antigen binding domain, a transmembrane domain, and an intracellular domain, said intracellular domain comprises a costimulatory domain and/or a primary signaling domain, wherein said antigen binding domain binds to the tumor-supporting antigen associated with the disease, e.g. a tumor-supporting antigen as described herein.

[1123] In a related aspect, the invention features a method of treating a subject having a disease associated with expression of a tumor-supporting antigen. The method comprises administering to the subject an effective amount of a cell, e.g., an immune effector cell (e.g., a population of immune effector cells) comprising a CAR molecule in combination with an agent that increases the efficacy of the immune cell, wherein:
[1124] the CAR molecule comprises an antigen binding domain, a transmembrane domain, and an intracellular domain comprising a costimulatory domain and/or a primary signaling domain, wherein said antigen binding domain binds to the tumor-supporting antigen associated with the disease, e.g. a tumor-supporting antigen as disclosed herein; and
[1125] the agent that increases the efficacy of the immune cell is chosen from one or more of:
[1126] a protein phosphatase inhibitor;
[1127] a kinase inhibitor;
[1128] a cytokine;
[1129] an inhibitor of an immune inhibitory molecule; or
[1130] an agent that decreases the level or activity of a TREG cell.

[1131] In a related aspect, the invention features a method of treating a subject having a disease associated with expression of a tumor-supporting antigen, comprising administering to the subject an effective amount of a cell, e.g., an immune effector cell (e.g., a population of immune effector cells) comprising a CAR molecule:
[1132] the CAR molecule comprises an antigen binding domain, a transmembrane domain, and an intracellular domain comprising a costimulatory domain and/or a primary signaling domain, wherein said antigen binding domain binds to the tumor-supporting antigen associated with the disease, e.g., a tumor-supporting antigen as disclosed herein; and
[1133] the antigen binding domain of the CAR molecule has a binding affinity at least 5-fold less than an antibody from which the antigen binding domain is derived.

[1134] In another aspect, the invention features a composition comprising an immune effector cell (e.g., a population of immune effector cells) comprising a CAR molecule for use in the treatment of a subject having a disease associated with expression of a tumor-supporting antigen, e.g., a disorder as described herein.

[1135] In any of the aforesaid methods or uses, the disease associated with expression of the tumor-supporting antigen is selected from the group consisting of a proliferative disease, a precancerous condition, a cancer, and a non-cancer related indication associated with expression of the tumor-supporting antigen. In an embodiment, the disease associated with a tumor-supporting antigen described herein is a solid tumor.

[1136] In one embodiment of the methods or uses described herein, the CAR molecule is administered in combination with another agent. In one embodiment, the agent can be a kinase inhibitor, e.g., a CDK4/6 inhibitor, a BTK inhibitor, an mTOR inhibitor, a MNK inhibitor, or a dual PI3K/mTOR inhibitor, and combinations thereof. In one embodiment, the kinase inhibitor is a CDK4 inhibitor, e.g., a CDK4 inhibitor described herein, e.g., a CD4/6 inhibitor, such as, e.g., 6-Acetyl-8-cyclopentyl-5-methyl-2-(5-piperazin-1-yl-pyridin-2-ylamino)-8H-pyrido[2,3-d]pyrimidin-7-one, hydrochloride (also referred to as palbociclib or PD0332991). In one embodiment, the kinase inhibitor is a BTK inhibitor, 30 e.g., a BTK inhibitor described herein, such as, e.g., ibrutinib. In one embodiment, the kinase inhibitor is an mTOR inhibitor, e.g., an mTOR inhibitor described herein, such as, e.g., rapamycin, a rapamycin analog, OSI-027. The mTOR inhibitor can be, e.g., an mTORC1 inhibitor and/or an mTORC2 inhibitor, e.g., an mTORC1 inhibitor and/or mTORC2 inhibitor described herein. In one embodiment, the kinase inhibitor is a MNK inhibitor, e.g., a MNK inhibitor described herein, such as, e.g., 4-amino-5-(4-fluoroanilino)-pyrazolo[3,4-d]pyrimidine. The MNK inhibitor can be, e.g., a MNK1a, MNK1b, MNK2a and/or MNK2b inhibitor. The dual PI3K/mTOR inhibitor can be, e.g., PF-04695102.

[1137] In one embodiment of the methods or uses described herein, the kinase inhibitor is a CDK4 inhibitor selected from aloisine A; flavopiridol or HMR-1275, 2-(2-chlorophenyl)-5,7-dihydroxy-8-[(3S,4R)-3-hydroxy-1-methyl-4-piperidinyl]-4-chromenone; crizotinib (PF-02341066; 2-(2-Chlorophenyl)-5,7-dihydroxy-8-[(2R,3S)-2-(hydroxymethyl)-1-methyl-3-pyrrolidinyl]-4H-1-benzopyran-4-one, hydrochloride (P276-00); 1-methyl-5-[[2-[5-(trifluoromethyl)-1H-imidazol-2-yl]-4-pyridinyl]oxy]-N-[4-(trifluoromethyl)phenyl]-1H-benzimidazol-2-amine (RAF265); indisulam (E7070); roscovitine (CYC202); palbociclib (PD0332991); dinaciclib (SCH727965); N-[5-[[(5-tert-butyloxazol-2-yl)methyl]thio]thiazol-2-yl]piperidine-4-carboxamide (BMS 387032); 4-[[9-chloro-7-(2,6-difluorophenyl)-5H-pyrimido[5,4-d][2]benzazepin-2-yl]amino]-benzoic acid (MLN8054); 5-[3-(4,6-difluoro-1H-benzimidazol-2-yl)-1H-indazol-5-yl]-N-ethyl-4-methyl-3-pyridinemethanamine (AG-024322); 4-(2,6-dichlorobenzoylamino)-1H-pyrazole-3-carboxylic acid N-(piperidin-4-yl)amide (AT7519); 4-[2-methyl-1-(1-methylethyl)-1H-imidazol-5-yl]-N-[4-(methylsulfonyl)phenyl]-2-pyrimidinamine (AZD5438); and XL281 (BMS908662).

[1138] In one embodiment of the methods or uses described herein, the kinase inhibitor is a CDK4 inhibitor, e.g., palbociclib (PD0332991), and the palbociclib is administered at a dose of about 50 mg, 60 mg, 70 mg, 75 mg, 80 mg, 90 mg, 100 mg, 105 mg, 110 mg, 115 mg, 120 mg, 125 mg, 130 mg, 135 mg (e.g., 75 mg, 100 mg or 125 mg) daily for a period of time, e.g., daily for 14-21 days of a 28 day cycle, or daily for 7-12 days of a 21 day cycle. In one embodiment, 1, 2, 3, 4, 5, 6, 7, 8, 9, 10, 11, 12 or more cycles of palbociclib are administered.

[1139] In one embodiment of the methods or uses described herein, the kinase inhibitor is a BTK inhibitor selected from ibrutinib (PCI-32765); GDC-0834; RN-486; CGI-560; CGI-1764; HM-71224; CC-292; ONO-4059; CNX-774; and LFM-A13. In one embodiment, the BTK inhibitor does not reduce or inhibit the kinase activity of interleukin-2-inducible kinase (ITK), and is selected from GDC-0834; RN-486; CGI-560; CGI-1764; HM-71224; CC-292; ONO-4059; CNX-774; and LFM-A13.

[1140] In one embodiment of the methods or uses described herein, the kinase inhibitor is a BTK inhibitor, e.g., ibrutinib (PCI-32765), and the ibrutinib is administered at a dose of about 250 mg, 300 mg, 350 mg, 400 mg, 420 mg, 440 mg, 460 mg, 480 mg, 500 mg, 520 mg, 540 mg, 560 mg, 580 mg, 600 mg (e.g., 250 mg, 420 mg or 560 mg) daily for a period of time, e.g., daily for 21 day cycle, or daily for 28 day cycle. In one embodiment, 1, 2, 3, 4, 5, 6, 7, 8, 9, 10, 11, 12 or more cycles of ibrutinib are administered.

[1141] In one embodiment of the methods or uses described herein, the kinase inhibitor is a BTK inhibitor that does not inhibit the kinase activity of ITK, e.g., RN-486, and RN-486 is administered at a dose of about 100 mg, 110 mg, 120 mg, 130 mg, 140 mg, 150 mg, 160 mg, 170 mg, 180 mg, 190 mg, 200 mg, 210 mg, 220 mg, 230 mg, 240 mg, 250 mg (e.g., 150 mg, 200 mg or 250 mg) daily for a period of time, e.g., daily a 28 day cycle. In one embodiment, 1, 2, 3, 4, 5, 6, 7, or more cycles of RN-486 are administered.

[1142] In one embodiment of the methods or uses described herein, the kinase inhibitor is an mTOR inhibitor selected from temsirolimus; ridaforolimus (1R,2R,4S)-4-[(2R)-2 [(1R,9S,12S,15R,16E,18R,19R,21R,23S,24E,26E,28Z,30S,32S,35R)-1,18-dihydroxy-19,30-dimethoxy-15,17,21,23, 29,35-hexamethyl-2,3,10,14,20-pentaoxo-11,36-dioxa-4-azatricyclo[30.3.1.04′9]hexatriaconta-16,24,26,28-tetraen-12-yl]propyl]-2-methoxycyclohexyl dimethylphosphinate, also known as AP23573 and MK8669; everolimus (RAD001); rapamycin (AY22989); simapimod; (5-{2,4-bis[(3S)-3-methylmorpholin-4-yl]pyrido[2,3-d]pyrimidin-7-yl}-2-methoxyphenyl)methanol (AZD8055); 2-amino-8-[trans-4-(2-hydroxyethoxy)cyclohexyl]-6-(6-methoxy-3-pyridinyl)-4-methyl-pyrido[2,3-d]pyrimidin-7(8H)-one (PF04691502); and N²-[1,4-dioxo-4-[[4-(4-oxo-8-phenyl-4H-1-benzopyran-2-yl)morpholinium-4-yl]methoxy]butyl]-L-arginylglycyl-L-α-aspartylL-serine- (SEQ ID NO: 112), inner salt (SF1126); and XL765.

[1143] In one embodiment of the methods or uses described herein, the kinase inhibitor is an mTOR inhibitor, e.g., rapamycin, and the rapamycin is administered at a dose of about 3 mg, 4 mg, 5 mg, 6 mg, 7 mg, 8 mg, 9 mg, 10 mg (e.g., 6 mg) daily for a period of time, e.g., daily for 21 day cycle, or daily for 28 day cycle. In one embodiment, 1, 2, 3, 4, 5, 6, 7, 8, 9, 10, 11, 12 or more cycles of rapamycin are administered. In one embodiment, the kinase inhibitor is an mTOR inhibitor, e.g., everolimus and the everolimus is administered at a dose of about 2 mg, 2.5 mg, 3 mg, 4 mg, 5 mg, 6 mg, 7 mg, 8 mg, 9 mg, 10 mg, 11 mg, 12 mg, 13 mg, 14 mg, 15 mg (e.g., 10 mg) daily for a period of time, e.g., daily for 28 day cycle. In one embodiment, 1, 2, 3, 4, 5, 6, 7, 8, 9, 10, 11, 12 or more cycles of everolimus are administered.

[1144] In one embodiment of the methods or uses described herein, the kinase inhibitor is an MNK inhibitor selected from CGP052088; 4-amino-3-(p-fluorophenylamino)-pyrazolo[3,4-d]pyrimidine (CGP57380); cercosporamide; ETC-1780445-2; and 4-amino-5-(4-fluoroanilino)-pyrazolo[3,4-d]pyrimidine.

[1145] In one embodiment of the methods or uses described herein, the kinase inhibitor is a dual phosphatidylinositol 3-kinase (P13K) and mTOR inhibitor selected from 2-Amino-8-[trans-4-(2-hydroxyethoxy)cyclohexyl]-6-(6-methoxy-3-pyridinyl)-4-methyl-pyrido[2,3-d]pyrimidin-7(8H)-one (PF-04691502); N-[4-[[4-(Dimethylamino)-1-piperidinyl]carbonyl]phenyl]-N′-[4-(4,6-di-4-morpholinyl-1,3,5-triazin-2-yl)phenyl]urea (PF-05212384, PKI-587); 2-Methyl-2-{4-[3-methyl-2-oxo-8-(quinolin-3-yl)-2,3-dihydro-1H-imidazo[4,5-c]quinolin-1-yl]phenyl}propanenitrile (BEZ-235); apitolisib (GDC-0980, RG7422); 2,4-Difluoro-N-{2-(methyloxy)-5-[4-(4-pyridazinyl)-6-quinolinyl]-3-pyridinyl}benzenesulfonamide (GSK2126458); 8-(6-methoxypyridin-3-yl)-3-methyl-1-(4-(piperazin-1-yl)-3-(trifluoromethyl)phenyl)-1H-imidazo[4,5-c]quinolin-2(3H)-one Maleic acid (NVP-BGT226); 3-[4-(4-Morpholinylpyrido[3′,2′:4,5]furo[3,2-d]pyrimidin-2-yl]phenol (PI-103); 5-(9-isopropyl-8-methyl-2-morpholino-9H-purin-6-yl)pyrimidin-2-amine (VS-5584, SB2343); and N-[2-[(3,5-Dimethoxyphenyl)amino]quinoxalin-3-yl]-4-[(4-methyl-3-methoxyphenyl)carbonyl]aminophenylsulfonamide (XL765).

[1146] In one embodiment of the methods or uses described herein, a CAR expressing immune effector cell described herein is administered to a subject in combination with a protein tyrosine phosphatase inhibitor, e.g., a protein tyrosine phosphatase inhibitor described herein. In one embodiment, the protein tyrosine phosphatase inhibitor is an SHP-1 inhibitor, e.g., an SHP-1 inhibitor described herein, such as, e.g., sodium stibogluconate. In one embodiment, the protein tyrosine phosphatase inhibitor is an SHP-2 inhibitor.

[1147] In one embodiment of the methods or uses described herein, the CAR molecule is administered in combination with another agent, and the agent is a cytokine. The cytokine can be, e.g., IL-7, IL-15, IL-21, or a combination thereof. In another embodiment, the CAR molecule is administered in combination with a checkpoint inhibitor, e.g., a checkpoint inhibitor described herein. For example, in one embodiment, the check point inhibitor inhibits an inhibitory molecule selected from PD-1, PD-L1, CTLA-4, TIM-3, CEACAM (e.g., CEACAM-1, CEACAM-3 and/or CEACAM-5), LAG-3, VISTA, BTLA, TIGIT, LAIR1, CD160, 2B4 and TGF beta.

[1148] In further aspects, a CAR-expressing cell described herein may be used in a treatment regimen in combination with surgery, chemotherapy, radiation, immunosuppressive agents, such as cyclosporin, azathioprine, methotrexate, mycophenolate, and FK506, antibodies, or other immunoablative agents such as CAMPATH, anti-CD3 antibodies or other antibody therapies, cytoxin, fludarabine, cyclosporin, FK506, rapamycin, mycophenolic acid, steroids, FR901228, cytokines, and irradiation. peptide vaccine, such as that described in Izumoto et al. 2008 J Neurosurg 108:963-971.

[1149] In one embodiment, a CAR-expressing cell described herein can be used in combination with a chemotherapeutic agent. Exemplary chemotherapeutic agents include an anthracycline (e.g., doxorubicin (e.g., liposomal doxorubicin)). a vinca alkaloid (e.g., vinblastine, vincristine, vindesine, vinorelbine), an alkylating agent (e.g., cyclophosphamide, decarbazine, melphalan, ifosfamide, temozolomide), an immune cell antibody (e.g., alemtuzamab, gemtuzumab, rituximab, ofatumumab, tositumomab, brentuximab), an antimetabolite (including, e.g., folic acid antagonists, pyrimidine analogs, purine analogs and adenosine deaminase inhibitors (e.g., fludarabine)), an mTOR inhibitor, a TNFR glucocorticoid induced TNFR related protein (GITR) agonist, a proteasome inhibitor (e.g., aclacinomycin A, gliotoxin or bortezomib), an immunomodulator such as thalidomide or a thalidomide derivative (e.g., lenalidomide).

[1150] General Chemotherapeutic agents considered for use in combination therapies include anastrozole (Arimidex®), bicalutamide (Casodex®), bleomycin sulfate (Blenoxane®), busulfan (Myleran®), busulfan injection (Busulfex®), capecitabine (Xeloda®), N4-pentoxy carbonyl-5-deoxy-5-fluorocytidine, carboplatin (Paraplatin®), carmustine (BiCNU®), chlorambucil (Leukeran®), cisplatin (Platinol®), cladribine (Leustatin®), cyclophosphamide (Cytoxan® or Neosar®), cytarabine, cytosine arabinoside (Cytosar-U®), cytarabine liposome injection (DepoCyt®), dacarbazine (DTIC-Dome®), dactinomycin (Actinomycin D, Cosmegan), daunorubicin hydrochloride (Cerubidine®), daunorubicin citrate liposome injection (DaunoXome®), dexamethasone, docetaxel (Taxotere®), doxorubicin hydrochloride (Adriamycin®, Rubex®), etoposide (Vepesid®), fludarabine phosphate (Fludara®), 5-fluorouracil (Adrucil®, Efudex®), flutamide (Eulexin®), tezacitibine, Gemcitabine (difluorodeoxycitidine), hydroxyurea (Hydrea®), Idarubicin (Idamycin®), ifosfamide (IFEX®), irinotecan (Camptosar®), L-asparaginase (ELSPAR®), leucovorin calcium, melphalan (Alkeran®), 6-mercaptopurine (Purinethol®), methotrexate (Folex®), mitoxantrone (Novantrone®), mylotarg, paclitaxel (Taxol®), phoenix (Yttrium90/MX-DTPA), pentostatin, polifeprosan 20 with carmustine implant (Gliadel®), tamoxifen citrate (Nolvadex®), teniposide (Vumon®), 6-thioguanine, thiotepa, tirapazamine (Tirazone®), topotecan hydrochloride for injection (Hycamptin®), vinblastine (Velban®), vincristine (Oncovin®), and vinorelbine (Navelbine®).

[1151] Exemplary alkylating agents include, without limitation, nitrogen mustards, ethylenimine derivatives, alkyl sulfonates, nitrosoureas and triazenes): uracil mustard (Aminouracil Mustard®, Chlorethaminacil®, Demethyldopan®, Desmethyldopan®, Haemanthamine®, Nordopan®, Uracil Nitrogen Mustard®, Uracillost®, Uracilmostaza®, Uramustin®, Uramustine®), chlormethine (Mustargen®), cyclophosphamide (Cytoxan®, Neosar®, Clafen®, Endoxan®, Procytox®, Revimmune™), ifosfamide (Mitoxana®), melphalan (Alkeran®), Chlorambucil (Leukeran®), pipobroman (Amedel®, Vercyte®), triethylenemelamine (Hemel®, Hexalen®, Hexastat®), triethylenethiophosphoramine, Temozolomide (Temodar®), thiotepa (Thioplex®), busulfan (Busilvex®, Myleran®), carmustine (BiCNU®), lomustine (CeeNU®), streptozocin (Zanosar®), and Dacarbazine (DTIC-Dome®). Additional exemplary alkylating agents include, without limitation, Oxaliplatin (Eloxatin®); Temozolomide (Temodar® and Temodal®); Dactinomycin (also known as actinomycin-D, Cosmegen®); Melphalan (also known as L-PAM, L-sarcolysin, and phenylalanine mustard, Alkeran®); Altretamine (also known as hexamethylmelamine (HMM), Hexalen®); Carmustine (BiCNU®); Bendamustine (Treanda®); Busulfan (BusulfexR and Myleran®); Carboplatin (Paraplatin®); Lomustine (also known as CCNU, CeeNU®); Cisplatin (also known as CDDP, Platinol® and Platinol®-AQ); Chlorambucil (Leukeran®); Cyclophosphamide (CytoxanR and Neosar®); Dacarbazine (also known as DTIC, DIC and imidazole carboxamide, DTIC-Dome®); Altretamine (also known as hexamethylmelamine (HMM), Hexalen®); Ifosfamide (Ifex®); Prednumustine; Procarbazine (Matulane®); Mechlorethamine (also known as nitrogen mustard, mustine and mechloroethamine hydrochloride, Mustargen®); Streptozocin (Zanosar®); Thiotepa (also known as thiophosphoamide, TESPA and TSPA, Thioplex@); Cyclophosphamide (Endoxan®, Cytoxan®, Neosar®, Procytox®, Revimmune®); and Bendamustine HCl (Treanda®).

[1152] In embodiments, a CAR-expressing cell described herein is administered to a subject in combination with fludarabine, cyclophosphamide, and/or rituximab. In embodiments, a CAR-expressing cell described herein is administered to a subject in combination with fludarabine, cyclophosphamide, and rituximab (FCR). In embodiments, the subject has CLL. For example, the subject has a deletion in the short arm of chromosome 17 (del(17p), e.g., in a leukemic cell). In other examples, the subject does not have a del(17p). In embodiments, the subject comprises a leukemic cell comprising a mutation in the immunoglobulin heavy-chain variable-region (IgV_{H}) gene. In other embodiments, the subject does not comprise a leukemic cell comprising a mutation in the immunoglobulin heavy-chain variable-region (IgV_{H}) gene. In embodiments, the fludarabine is administered at a dosage of about 10-50 mg/m² (e.g., about 10-15, 15-20, 20-25, 25-30, 30-35, 35-40, 40-45, or 45-50 mg/m²), e.g., intravenously. In embodiments, the cyclophosphamide is administered at a dosage of about 200-300 mg/m² (e.g., about 200-225, 225-250, 250-275, or 275-300 mg/m²), e.g., intravenously. In embodiments, the rituximab is administered at a dosage of about 400-600 mg/m2 (e.g., 400-450, 450-500, 500-550, or 550-600 mg/m²), e.g., intravenously.

[1153] In embodiments, a CAR-expressing cell described herein is administered to a subject in combination with bendamustine and rituximab. In embodiments, the subject has CLL. For example, the subject has a deletion in the short arm of chromosome 17 (del(17p), e.g., in a leukemic cell). In other examples, the subject does not have a del(17p). In embodiments, the subject comprises a leukemic cell comprising a mutation in the immunoglobulin heavy-chain variable-region (IgV_{H}) gene. In other embodiments, the subject does not comprise a leukemic cell comprising a mutation in the immunoglobulin heavy-chain variable-region (IgV_{H}) gene. In embodiments, the bendamustine is administered at a dosage of about 70-110 mg/m2 (e.g., 70-80, 80-90, 90-100, or 100-110 mg/m2), e.g., intravenously. In embodiments, the rituximab is administered at a dosage of about 400-600 mg/m2 (e.g., 400-450, 450-500, 500-550, or 550-600 mg/m²), e.g., intravenously.

[1154] In embodiments, a CAR-expressing cell described herein is administered to a subject in combination with rituximab, cyclophosphamide, doxorubicine, vincristine, and/or a corticosteroid (e.g., prednisone). In embodiments, a CAR-expressing cell described herein is administered to a subject in combination with rituximab, cyclophosphamide, doxorubicine, vincristine, and prednisone (R—CHOP). In embodiments, the subject has diffuse large B-cell lymphoma (DLBCL). In embodiments, the subject has nonbulky limited-stage DLBCL (e.g., comprises a tumor having a size/diameter of less than 7 cm). In embodiments, the subject is treated with radiation in combination with the R—CHOP. For example, the subject is administered R—CHOP (e.g., 1-6 cycles, e.g., 1, 2, 3, 4, 5, or 6 cycles of R—CHOP), followed by radiation. In some cases, the subject is administered R—CHOP (e.g., 1-6 cycles, e.g., 1, 2, 3, 4, 5, or 6 cycles of R—CHOP) following radiation.

[1155] In embodiments, a CAR-expressing cell described herein is administered to a subject in combination with etoposide, prednisone, vincristine, cyclophosphamide, doxorubicin, and/or rituximab. In embodiments, a CAR-expressing cell described herein is administered to a subject in combination with etoposide, prednisone, vincristine, cyclophosphamide, doxorubicin, and rituximab (EPOCH-R). In embodiments, a CAR-expressing cell described herein is administered to a subject in combination with dose-adjusted EPOCH-R (DA-EPOCH-R). In embodiments, the subject has a B cell lymphoma, e.g., a Myc-rearranged aggressive B cell lymphoma.

[1156] In embodiments, a CAR-expressing cell described herein is administered to a subject in combination with rituximab and/or lenalidomide. Lenalidomide ((RS)-3-(4-Amino-1-oxo 1,3-dihydro-2H-isoindol-2-yl)piperidine-2,6-dione) is an immunomodulator. In embodiments, a CAR-expressing cell described herein is administered to a subject in combination with rituximab and lenalidomide. In embodiments, the subject has follicular lymphoma (FL) or mantle cell lymphoma (MCL). In embodiments, the subject has FL and has not previously been treated with a cancer therapy. In embodiments, lenalidomide is administered at a dosage of about 10-20 mg (e.g., 10-15 or 15-20 mg), e.g., daily. In embodiments, rituximab is administered at a dosage of about 350-550 mg/m² (e.g., 350-375, 375-400, 400-425, 425-450, 450-475, or 475-500 mg/m²), e.g., intravenously.

[1157] Exemplary mTOR inhibitors include, e.g., temsirolimus; ridaforolimus (formally known as deferolimus, (1R,2R,4S)-4-[(2R)-2 [(1R,9S,12S,15R,16E,18R,19R,21R, 23S,24E,26E,28Z,30S,32S,35R)-1,18-dihydroxy-19,30-dimethoxy-15,17,21,23, 29,35-hexamethyl-2,3,10,14,20-pentaoxo-11,36-dioxa-4-azatricyclo[30.3.1.04-9]hexatriaconta-16,24,26,28-tetraen-12-yl]propyl]-2-methoxycyclohexyl dimethylphosphinate, also known as AP23573 and MK8669, and described in PCT Publication No. WO 03/064383); everolimus (Afinitor® or RAD001); rapamycin (AY22989, Sirolimus®); simapimod (CAS 164301-51-3); emsirolimus, (5-{2,4-Bis[(3S)-3-methylmorpholin-4-yl]pyrido[2,3-d]pyrimidin-7-yl}-2-methoxyphenyl)methanol (AZD8055); 2-Amino-8-[trans-4-(2-hydroxyethoxy)cyclohexyl]-6-(6-methoxy-3-pyridinyl)-4-methyl-pyrido[2,3-d]pyrimidin-7(8H)-one (PF04691502, CAS 1013101-36-4); and N²-[1,4-dioxo-4-[[4-(4-oxo-8-phenyl-4H-1-benzopyran-2-yl)morpholinium-4-yl]methoxy]butyl]-L-arginylglycyl-L-a-aspartylL-serine- (SEQ ID NO: 112), inner salt (SF1126, CAS 936487-67-1), and XL765.

[1158] Exemplary immunomodulators include, e.g., afutuzumab (available from Roche®); pegfilgrastim (Neulasta®); lenalidomide (CC-5013, Revlimid@); thalidomide (Thalomid®), actimid (CC4047); and IRX-2 (mixture of human cytokines including interleukin 1, interleukin 2, and interferon γ, CAS 951209-71-5, available from IRX Therapeutics).

[1159] Exemplary anthracyclines include, e.g., doxorubicin (Adriamycin® and Rubex®); bleomycin (Lenoxane®); daunorubicin (dauorubicin hydrochloride, daunomycin, and rubidomycin hydrochloride, Cerubidine®); daunorubicin liposomal (daunorubicin citrate liposome, DaunoXome®); mitoxantrone (DHAD, Novantrone®); epirubicin (Ellence™); idarubicin (Idamycin®, Idamycin PFS®); mitomycin C (Mutamycin®); geldanamycin; herbimycin; ravidomycin; and desacetylravidomycin.

[1160] Exemplary vinca alkaloids include, e.g., vinorelbine tartrate (Navelbine®), Vincristine (Oncovin®), and Vindesine (Eldisine®)); vinblastine (also known as vinblastine sulfate, vincaleukoblastine and VLB, Alkaban-AQ® and Velban®); and vinorelbine (Navelbine®).

[1161] Exemplary proteosome inhibitors include bortezomib (Velcade®); carfilzomib (PX-171-007, (S)-4-Methyl-N—((S)-1-(((S)-4-methyl-1-((R)-2-methyloxiran-2-yl)-1-oxopentan-2-yl)amino)-1-oxo-3-phenylpropan-2-yl)-2-((S)-2-(2-morpholinoacetamido)-4-phenylbutanamido)-pentanamide); marizomib (NPI-0052); ixazomib citrate (MLN-9708); delanzomib (CEP-18770); and O-Methyl-N-[(2-methyl-5-thiazolyl)carbonyl]-L-seryl-O-methyl-N-[(1S)-2-[(2R)-2-methyl-2-oxiranyl]-2-oxo-1-(phenylmethyl)ethyl]-L-serinamide (ONX-0912).

[1162] In embodiments, a CAR-expressing cell described herein is administered to a subject in combination with brentuximab. Brentuximab is an antibody-drug conjugate of anti-CD30 antibody and monomethyl auristatin E. In embodiments, the subject has Hodgkin's lymphoma (HL), e.g., relapsed or refractory HL. In embodiments, the subject comprises CD30+HL. In embodiments, the subject has undergone an autologous stem cell transplant (ASCT). In embodiments, the subject has not undergone an ASCT. In embodiments, brentuximab is administered at a dosage of about 1-3 mg/kg (e.g., about 1-1.5, 1.5-2, 2-2.5, or 2.5-3 mg/kg), e.g., intravenously, e.g., every 3 weeks.

[1163] In embodiments, a CAR-expressing cell described herein is administered to a subject in combination with brentuximab and dacarbazine or in combination with brentuximab and bendamustine. Dacarbazine is an alkylating agent with a chemical name of 5-(3,3-Dimethyl-1-triazenyl)imidazole-4-carboxamide. Bendamustine is an alkylating agent with a chemical name of 4-[5-[Bis(2-chloroethyl)amino]-1-methylbenzimidazol-2-yl]butanoic acid. In embodiments, the subject has Hodgkin's lymphoma (HL). In embodiments, the subject has not previously been treated with a cancer therapy. In embodiments, the subject is at least 60 years of age, e.g., 60, 65, 70, 75, 80, 85, or older. In embodiments, dacarbazine is administered at a dosage of about 300-450 mg/m² (e.g., about 300-325, 325-350, 350-375, 375-400, 400-425, or 425-450 mg/m²), e.g., intravenously. In embodiments, bendamustine is administered at a dosage of about 75-125 mg/m2 (e.g., 75-100 or 100-125 mg/m², e.g., about 90 mg/m²), e.g., intravenously. In embodiments, brentuximab is administered at a dosage of about 1-3 mg/kg (e.g., about 1-1.5, 1.5-2, 2-2.5, or 2.5-3 mg/kg), e.g., intravenously, e.g., every 3 weeks.

[1164] In some embodiments, a CAR-expressing cell described herein is administered to a subject in combination with a CD20 inhibitor, e.g., an anti-CD20 antibody (e.g., an anti-CD20 mono- or bispecific antibody) or a fragment thereof. Exemplary anti-CD20 antibodies include but are not limited to rituximab, ofatumumab, ocrelizumab, veltuzumab, obinutuzumab, TRU-015 (Trubion Pharmaceuticals), ocaratuzumab, and Prol31921 (Genentech). See, e.g., Lim et al. Haematologica. 95.1(2010):135-43.

[1165] In some embodiments, the anti-CD20 antibody comprises rituximab. Rituximab is a chimeric mouse/human monoclonal antibody IgG1 kappa that binds to CD20 and causes cytolysis of a CD20 expressing cell, e.g., as described in www.accessdata.fda.gov/drugsatfda_docs/label/2010/103705s5311lbl.pdf. In embodiments, a CAR-expressing cell described herein is administered to a subject in combination with rituximab. In embodiments, the subject has CLL or SLL.

[1166] In some embodiments, rituximab is administered intravenously, e.g., as an intravenous infusion. For example, each infusion provides about 500-2000 mg (e.g., about 500-550, 550-600, 600-650, 650-700, 700-750, 750-800, 800-850, 850-900, 900-950, 950-1000, 1000-1100, 1100-1200, 1200-1300, 1300-1400, 1400-1500, 1500-1600, 1600-1700, 1700-1800, 1800-1900, or 1900-2000 mg) of rituximab. In some embodiments, rituximab is administered at a dose of 150 mg/m² to 750 mg/m², e.g., about 150-175 mg/m², 175-200 mg/m², 200-225 mg/m², 225-250 mg/m², 250-300 mg/m², 300-325 mg/m², 325-350 mg/m2, 350-375 mg/m², 375-400 mg/m², 400-425 mg/m², 425-450 mg/m², 450-475 mg/m², 475-500 mg/m², 500-525 mg/m², 525-550 mg/m², 550-575 mg/m², 575-600 mg/m², 600-625 mg/m², 625-650 mg/m², 650-675 mg/m², or 675-700 mg/m², where m² indicates the body surface area of the subject. In some embodiments, rituximab is administered at a dosing interval of at least 4 days, e.g., 4, 7, 14, 21, 28, 35 days, or more. For example, rituximab is administered at a dosing interval of at least 0.5 weeks, e.g., 0.5, 1, 2, 3, 4, 5, 6, 7, 8 weeks, or more. In some embodiments, rituximab is administered at a dose and dosing interval described herein for a period of time, e.g., at least 2 weeks, e.g., at least 2, 3, 4, 5, 6, 7, 8, 9, 10, 11, 12, 13, 14, 15, 16, 17, 18, 19, 20 weeks, or greater. For example, rituximab is administered at a dose and dosing interval described herein for a total of at least 4 doses per treatment cycle (e.g., at least 4, 5, 6, 7, 8, 9, 10, 11, 12, 13, 14, 15, 16, or more doses per treatment cycle).

[1167] In some embodiments, the anti-CD20 antibody comprises ofatumumab. Ofatumumab is an anti-CD20 IgG1κ human monoclonal antibody with a molecular weight of approximately 149 kDa. For example, ofatumumab is generated using transgenic mouse and hybridoma technology and is expressed and purified from a recombinant murine cell line (NS0). See, e.g., www.accessdata.fda.gov/drugsatfda_docs/label/2009/1253261b1.pdf; and Clinical Trial Identifier number NCT01363128, NCT01515176, NCT01626352, and NCT01397591. In embodiments, a CAR-expressing cell described herein is administered to a subject in combination with ofatumumab. In embodiments, the subject has CLL or SLL.

[1168] In some embodiments, ofatumumab is administered as an intravenous infusion. For example, each infusion provides about 150-3000 mg (e.g., about 150-200, 200-250, 250-300, 300-350, 350-400, 400-450, 450-500, 500-550, 550-600, 600-650, 650-700, 700-750, 750-800, 800-850, 850-900, 900-950, 950-1000, 1000-1200, 1200-1400, 1400-1600, 1600-1800, 1800-2000, 2000-2200, 2200-2400, 2400-2600, 2600-2800, or 2800-3000 mg) of ofatumumab. In embodiments, ofatumumab is administered at a starting dosage of about 300 mg, followed by 2000 mg, e.g., for about 11 doses, e.g., for 24 weeks. In some embodiments, ofatumumab is administered at a dosing interval of at least 4 days, e.g., 4, 7, 14, 21, 28, 35 days, or more. For example, ofatumumab is administered at a dosing interval of at least 1 week, e.g., 1, 2, 3, 4, 5, 6, 7, 8, 9, 10, 11, 12, 24, 26, 28, 20, 22, 24, 26, 28, 30 weeks, or more. In some embodiments, ofatumumab is administered at a dose and dosing interval described herein for a period of time, e.g., at least 1 week, e.g., 1, 2, 3, 4, 5, 6, 7, 8, 9, 10, 11, 12, 13, 14, 15, 16, 17, 18, 19, 20, 22, 24, 26, 28, 30, 40, 50, 60 weeks or greater, or 1, 2, 3, 4, 5, 6, 7, 8, 9, 10, 11, 12 months or greater, or 1, 2, 3, 4, 5 years or greater. For example, ofatumumab is administered at a dose and dosing interval described herein for a total of at least 2 doses per treatment cycle (e.g., at least 2, 3, 4, 5, 6, 7, 8, 9, 10, 11, 12, 13, 14, 15, 16, 18, 20, or more doses per treatment cycle).

[1169] In some cases, the anti-CD20 antibody comprises ocrelizumab. Ocrelizumab is a humanized anti-CD20 monoclonal antibody, e.g., as described in Clinical Trials Identifier Nos. NCT00077870, NCT01412333, NCT00779220, NCT00673920, NCT01194570, and Kappos et al. Lancet. 19.378(2011):1779-87.

[1170] In some cases, the anti-CD20 antibody comprises veltuzumab. Veltuzumab is a humanized monoclonal antibody against CD20. See, e.g., Clinical Trial Identifier No. NCT00547066, NCT00546793, NCT01101581, and Goldenberg et al. Leuk Lymphoma. 51(5)(2010):747-55.

[1171] In some cases, the anti-CD20 antibody comprises GA101. GA101 (also called obinutuzumab or R05072759) is a humanized and glyco-engineered anti-CD20 monoclonal antibody. See, e.g., Robak. Curr. Opin. Investig. Drugs. 10.6(2009):588-96; Clinical Trial Identifier Numbers: NCT01995669, NCT01889797, NCT02229422, and NCT01414205; and www.accessdata.fda.gov/drugsatfda_docs/label/2013/125486s0001b1.pdf.

[1172] In some cases, the anti-CD20 antibody comprises AME-133v. AME-133v (also called LY2469298 or ocaratuzumab) is a humanized IgG1 monoclonal antibody against CD20 with increased affinity for the FcγRIIIa receptor and an enhanced antibody dependent cellular cytotoxicity (ADCC) activity compared with rituximab. See, e.g., Robak et al. BioDrugs 25.1(2011):13-25; and Forero-Torres et al. Clin Cancer Res. 18.5(2012):1395-403.

[1173] In some cases, the anti-CD20 antibody comprises PRO131921. PRO131921 is a humanized anti-CD20 monoclonal antibody engineered to have better binding to FcγRIIIa and enhanced ADCC compared with rituximab. See, e.g., Robak et al. BioDrugs 25.1(2011):13-25; and Casulo et al. Clin Immunol. 154.1(2014):37-46; and Clinical Trial Identifier No. NCT00452127.

[1174] In some cases, the anti-CD20 antibody comprises TRU-015. TRU-015 is an anti-CD20 fusion protein derived from domains of an antibody against CD20. TRU-015 is smaller than monoclonal antibodies, but retains Fc-mediated effector functions. See, e.g., Robak et al. BioDrugs 25.1(2011):13-25. TRU-015 contains an anti-CD20 single-chain variable fragment (scFv) linked to human IgG1 hinge, CH2, and CH3 domains but lacks CH1 and CL domains.

[1175] In some embodiments, an anti-CD20 antibody described herein is conjugated or otherwise bound to a therapeutic agent, e.g., a chemotherapeutic agent (e.g., cytoxan, fludarabine, histone deacetylase inhibitor, demethylating agent, peptide vaccine, anti-tumor antibiotic, tyrosine kinase inhibitor, alkylating agent, anti-microtubule or anti-mitotic agent), anti-allergic agent, anti-nausea agent (or anti-emetic), pain reliever, or cytoprotective agent described herein.

[1176] In embodiments, a CAR-expressing cell described herein is administered to a subject in combination with a B-cell lymphoma 2 (BCL-2) inhibitor (e.g., venetoclax, also called ABT-199 or GDC-0199;) and/or rituximab. In embodiments, a CAR-expressing cell described herein is administered to a subject in combination with venetoclax and rituximab. Venetoclax is a small molecule that inhibits the anti-apoptotic protein, BCL-2. The structure of venetoclax (4-(4-{[2-(4-chlorophenyl)-4,4-dimethylcyclohex-1-en-1-yl]methyl}piperazin-1-yl)-N-({3-nitro-4-[(tetrahydro-2H-pyran-4-ylmethyl)amino]phenyl}sulfonyl)-2-(1H-pyrrolo[2,3-b]pyridin-5-yloxy)benzamide) is shown below.

[chemical structure]

[1177] In embodiments, the subject has CLL. In embodiments, the subject has relapsed CLL, e.g., the subject has previously been administered a cancer therapy. In embodiments, venetoclax is administered at a dosage of about 15-600 mg (e.g., 15-20, 20-50, 50-75, 75-100, 100-200, 200-300, 300-400, 400-500, or 500-600 mg), e.g., daily. In embodiments, rituximab is administered at a dosage of about 350-550 mg/m2 (e.g., 350-375, 375-400, 400-425, 425-450, 450-475, or 475-500 mg/m2), e.g., intravenously, e.g., monthly

[1178] In an embodiment, cells expressing a CAR described herein are administered to a subject in combination with a molecule that decreases the Treg cell population. Methods that decrease the number of (e.g., deplete) Treg cells are known in the art and include, e.g., CD25 depletion, cyclophosphamide administration, modulating GITR function. Without wishing to be bound by theory, it is believed that reducing the number of Treg cells in a subject prior to apheresis or prior to administration of a CAR-expressing cell described herein reduces the number of unwanted immune cells (e.g., Tregs) in the tumor microenvironment and reduces the subject's risk of relapse. In one embodiment, cells expressing a CAR described herein are administered to a subject in combination with a molecule targeting GITR and/or modulating GITR functions, such as a GITR agonist and/or a GITR antibody that depletes regulatory T cells (Tregs). In embodiments, cells expressing a CAR described herein are administered to a subject in combination with cyclophosphamide. In one embodiment, the GITR binding molecules and/or molecules modulating GITR functions (e.g., GITR agonist and/or Treg depleting GITR antibodies) are administered prior to administration of the CAR-expressing cell. For example, in one embodiment, the GITR agonist can be administered prior to apheresis of the cells. In embodiments, cyclophosphamide is administered to the subject prior to administration (e.g., infusion or re-infusion) of the CAR-expressing cell or prior to apheresis of the cells. In embodiments, cyclophosphamide and an anti-GITR antibody are administered to the subject prior to administration (e.g., infusion or re-infusion) of the CAR-expressing cell or prior to apheresis of the cells. In one embodiment, the subject has cancer (e.g., a solid cancer or a hematological cancer such as ALL or CLL). In an embodiment, the subject has CLL. In embodiments, the subject has ALL. In embodiments, the subject has a solid cancer, e.g., a solid cancer described herein. Exemplary GITR agonists include, e.g., GITR fusion proteins and anti-GITR antibodies (e.g., bivalent anti-GITR antibodies) such as, e.g., a GITR fusion protein described in U.S. Pat. No. 6,111,090, European Patent No.: 090505B1, U.S. Pat. No. 8,586,023, PCT Publication Nos.: WO 2010/003118 and 2011/090754, or an anti-GITR antibody described, e.g., in U.S. Pat. No. 7,025,962, European Patent No.: 1947183B1, U.S. Pat. Nos. 7,812,135, 8,388,967, 8,591,886, European Patent No.: EP 1866339, PCT Publication No.: WO 2011/028683, PCT Publication No.: WO 2013/039954, PCT Publication No.: WO2005/007190, PCT Publication No.: WO 2007/133822, PCT Publication No.: WO2005/055808, PCT Publication No.: WO 99/40196, PCT Publication No.: WO 2001/03720, PCT Publication No.: WO99/20758, PCT Publication No.: WO2006/083289, PCT Publication No.: WO 2005/115451, U.S. Pat. No. 7,618,632, and PCT Publication No.: WO 2011/051726.

[1179] In one embodiment, a CAR expressing cell described herein is administered to a subject in combination with an mTOR inhibitor, e.g., an mTOR inhibitor described herein, e.g., a rapalog such as everolimus. In one embodiment, the mTOR inhibitor is administered prior to the CAR-expressing cell. For example, in one embodiment, the mTOR inhibitor can be administered prior to apheresis of the cells. In one embodiment, the subject has CLL.

[1180] In one embodiment, a CAR expressing cell described herein is administered to a subject in combination with a GITR agonist, e.g., a GITR agonist described herein. In one embodiment, the GITR agonist is administered prior to the CAR-expressing cell. For example, in one embodiment, the GITR agonist can be administered prior to apheresis of the cells. In one embodiment, the subject has CLL.

[1181] In one embodiment, a CAR-expressing cell described herein can be used in combination with a kinase inhibitor. In one embodiment, the kinase inhibitor is a CDK4 inhibitor, e.g., a CDK4 inhibitor described herein, e.g., a CD4/6 inhibitor, such as, e.g., 6-Acetyl-8-cyclopentyl-5-methyl-2-(5-piperazin-1-yl-pyridin-2-ylamino)-8H-pyrido[2,3-d]pyrimidin-7-one, hydrochloride (also referred to as palbociclib or PD0332991). In one embodiment, the kinase inhibitor is a BTK inhibitor, e.g., a BTK inhibitor described herein, such as, e.g., ibrutinib. In one embodiment, the kinase inhibitor is an mTOR inhibitor, e.g., an mTOR inhibitor described herein, such as, e.g., rapamycin, a rapamycin analog, OSI-027. The mTOR inhibitor can be, e.g., an mTORCT inhibitor and/or an mTORC2 inhibitor, e.g., an mTORCT inhibitor and/or mTORC2 inhibitor described herein. In one embodiment, the kinase inhibitor is a MNK inhibitor, e.g., a MNK inhibitor described herein, such as, e.g., 4-amino-5-(4-fluoroanilino)-pyrazolo[3,4-d]pyrimidine. The MNK inhibitor can be, e.g., a MNK1a, MNK1b, MNK2a and/or MNK2b inhibitor. In one embodiment, the kinase inhibitor is a dual PI3K/mTOR inhibitor described herein, such as, e.g., PF-04695102.

[1182] In one embodiment, the kinase inhibitor is a CDK4 inhibitor selected from aloisine A; flavopiridol or HMR-1275, 2-(2-chlorophenyl)-5,7-dihydroxy-8-[(3S,4R)-3-hydroxy-1-methyl-4-piperidinyl]-4-chromenone; crizotinib (PF-02341066; 2-(2-Chlorophenyl)-5,7-dihydroxy-8-[(2R,3S)-2-(hydroxymethyl)-1-methyl-3-pyrrolidinyl]-4H-1-benzopyran-4-one, hydrochloride (P276-00); 1-methyl-5-[[2-[5-(trifluoromethyl)-1H-imidazol-2-yl]-4-pyridinyl]oxy]-N-[4-(trifluoromethyl)phenyl]-1H-benzimidazol-2-amine (RAF265); indisulam (E7070); roscovitine (CYC202); palbociclib (PD0332991); dinaciclib (SCH727965); N-[5-[[(5-tert-butyloxazol-2-yl)methyl]thio]thiazol-2-yl]piperidine-4-carboxamide (BMS 387032); 4-[[9-chloro-7-(2,6-difluorophenyl)-5H-pyrimido[5,4-d][2]benzazepin-2-yl]amino]-benzoic acid (MLN8054); 5-[3-(4,6-difluoro-1H-benzimidazol-2-yl)-1H-indazol-5-yl]-N-ethyl-4-methyl-3-pyridinemethanamine (AG-024322); 4-(2,6-dichlorobenzoylamino)-1H-pyrazole-3-carboxylic acid N-(piperidin-4-yl)amide (AT7519); 4-[2-methyl-1-(1-methylethyl)-1H-imidazol-5-yl]-N-[4-(methylsulfonyl)phenyl]-2-pyrimidinamine (AZD5438); and XL281 (BMS908662).

[1183] In one embodiment, the kinase inhibitor is a CDK4 inhibitor, e.g., palbociclib (PD0332991), and the palbociclib is administered at a dose of about 50 mg, 60 mg, 70 mg, 75 mg, 80 mg, 90 mg, 100 mg, 105 mg, 110 mg, 115 mg, 120 mg, 125 mg, 130 mg, 135 mg (e.g., 75 mg, 100 mg or 125 mg) daily for a period of time, e.g., daily for 14-21 days of a 28 day cycle, or daily for 7-12 days of a 21 day cycle. In one embodiment, 1, 2, 3, 4, 5, 6, 7, 8, 9, 10, 11, 12 or more cycles of palbociclib are administered.

[1184] In embodiments, a CAR-expressing cell described herein is administered to a subject in combination with a cyclin-dependent kinase (CDK) 4 or 6 inhibitor, e.g., a CDK4 inhibitor or a CDK6 inhibitor described herein. In embodiments, a CAR-expressing cell described herein is administered to a subject in combination with a CDK4/6 inhibitor (e.g., an inhibitor that targets both CDK4 and CDK6), e.g., a CDK4/6 inhibitor described herein. In an embodiment, the subject has MCL. MCL is an aggressive cancer that is poorly responsive to currently available therapies, i.e., essentially incurable. In many cases of MCL, cyclin D1 (a regulator of CDK4/6) is expressed (e.g., due to chromosomal translocation involving immunoglobulin and Cyclin D1 genes) in MCL cells. Thus, without being bound by theory, it is thought that MCL cells are highly sensitive to CDK4/6 inhibition with high specificity (i.e., minimal effect on normal immune cells). CDK4/6 inhibitors alone have had some efficacy in treating MCL, but have only achieved partial remission with a high relapse rate. An exemplary CDK4/6 inhibitor is LEE011 (also called ribociclib), the structure of which is shown below.

[chemical structure]

[1185] Without being bound by theory, it is believed that administration of a CAR-expressing cell described herein with a CDK4/6 inhibitor (e.g., LEE011 or other CDK4/6 inhibitor described herein) can achieve higher responsiveness, e.g., with higher remission rates and/or lower relapse rates, e.g., compared to a CDK4/6 inhibitor alone.

[1186] In one embodiment, the kinase inhibitor is a BTK inhibitor selected from ibrutinib (PCI-32765); GDC-0834; RN-486; CGI-560; CGI-1764; HM-71224; CC-292; ONO-4059; CNX-774; and LFM-A13. In a preferred embodiment, the BTK inhibitor does not reduce or inhibit the kinase activity of interleukin-2-inducible kinase (ITK), and is selected from GDC-0834; RN-486; CGI-560; CGI-1764; HM-71224; CC-292; ONO-4059; CNX-774; and LFM-A13.

[1187] In one embodiment, the kinase inhibitor is a BTK inhibitor, e.g., ibrutinib (PCI-32765). In embodiments, a CAR-expressing cell described herein is administered to a subject in combination with a BTK inhibitor (e.g., ibrutinib). In embodiments, a CAR-expressing cell described herein is administered to a subject in combination with ibrutinib 15 (also called PCI-32765). The structure of ibrutinib (1-[(3R)-3-[4-Amino-3-(4-phenoxyphenyl)-1H-pyrazolo[3,4-d]pyrimidin-1-yl]piperidin-1-yl]prop-2-en-1-one) is shown below.

[chemical structure]

[1188] In embodiments, the subject has CLL, mantle cell lymphoma (MCL), or small lymphocytic lymphoma (SLL). For example, the subject has a deletion in the short arm of chromosome 17 (del(17p), e.g., in a leukemic cell). In other examples, the subject does not have a del(17p). In embodiments, the subject has relapsed CLL or SLL, e.g., the subject has previously been administered a cancer therapy (e.g., previously been administered one, two, three, or four prior cancer therapies). In embodiments, the subject has refractory CLL or SLL. In other embodiments, the subject has follicular lymphoma, e.g., relapse or refractory follicular lymphoma. In some embodiments, ibrutinib is administered at a dosage of about 300-600 mg/day (e.g., about 300-350, 350-400, 400-450, 450-500, 500-550, or 550-600 mg/day, e.g., about 420 mg/day or about 560 mg/day), e.g., orally. In embodiments, the ibrutinib is administered at a dose of about 250 mg, 300 mg, 350 mg, 400 mg, 420 mg, 440 mg, 460 mg, 480 mg, 500 mg, 520 mg, 540 mg, 560 mg, 580 mg, 600 mg (e.g., 250 mg, 420 mg or 560 mg) daily for a period of time, e.g., daily for 21 day cycle, or daily for 28 day cycle. In one embodiment, 1, 2, 3, 4, 5, 6, 7, 8, 9, 10, 11, 12 or more cycles of ibrutinib are administered. Without being bound by theory, it is thought that the addition of ibrutinib enhances the T cell proliferative response and may shift T cells from a T-helper-2 (Th2) to T-helper-1 (Th1) phenotype. Th1 and Th2 are phenotypes of helper T cells, with Th1 versus Th2 directing different immune response pathways. A Th1 phenotype is associated with proinflammatory responses, e.g., for killing cells, such as intracellular pathogens/viruses or cancerous cells, or perpetuating autoimmune responses. A Th2 phenotype is associated with eosinophil accumulation and anti-inflammatory responses.

[1189] In one embodiment, the kinase inhibitor is an mTOR inhibitor selected from temsirolimus; ridaforolimus (1R,2R,4S)-4-[(2R)-2 [(1R,9S,12S,15R,16E,18R,19R,21R, 23S,24E,26E,28Z,30S,32S,35R)-1,18-dihydroxy-19,30-dimethoxy-15,17,21,23, 29,35-hexamethyl-2,3,10,14,20-pentaoxo-11,36-dioxa-4-azatricyclo[30.3.1.04-9]hexatriaconta-16,24,26,28-tetraen-12-yl]propyl]-2-methoxycyclohexyl dimethylphosphinate, also known as AP23573 and MK8669; everolimus (RAD001); rapamycin (AY22989); simapimod; (5-{2,4-bis[(3S)-3-methylmorpholin-4-yl]pyrido[2,3-d]pyrimidin-7-yl}-2-methoxyphenyl)methanol (AZD8055); 2-amino-8-[trans-4-(2-hydroxyethoxy)cyclohexyl]-6-(6-methoxy-3-pyridinyl)-4-methyl-pyrido[2,3-d]pyrimidin-7(8H)-one (PF04691502); and N²-[1,4-dioxo-4-[[4-(4-oxo-8-phenyl-4H-1-benzopyran-2-yl)morpholinium-4-yl]methoxy]butyl]-L-arginylglycyl-L-a-aspartylL-serine- (SEQ ID NO: 112), inner salt (SF1126); and XL765.

[1190] In one embodiment, the kinase inhibitor is an mTOR inhibitor, e.g., rapamycin, and the rapamycin is administered at a dose of about 3 mg, 4 mg, 5 mg, 6 mg, 7 mg, 8 mg, 9 mg, 10 mg (e.g., 6 mg) daily for a period of time, e.g., daily for 21 day cycle, or daily for 28 day cycle. In one embodiment, 1, 2, 3, 4, 5, 6, 7, 8, 9, 10, 11, 12 or more cycles of rapamycin are administered. In one embodiment, the kinase inhibitor is an mTOR inhibitor, e.g., everolimus and the everolimus is administered at a dose of about 2 mg, 2.5 mg, 3 mg, 4 mg, 5 mg, 6 mg, 7 mg, 8 mg, 9 mg, 10 mg, 11 mg, 12 mg, 13 mg, 14 mg, 15 mg (e.g., 10 mg) daily for a period of time, e.g., daily for 28 day cycle. In one embodiment, 1, 2, 3, 4, 5, 6, 7, 8, 9, 10, 11, 12 or more cycles of everolimus are administered.

[1191] In one embodiment, the kinase inhibitor is an MNK inhibitor selected from CGP052088; 4-amino-3-(p-fluorophenylamino)-pyrazolo[3,4-d]pyrimidine (CGP57380); cercosporamide; ETC-1780445-2; and 4-amino-5-(4-fluoroanilino)-pyrazolo[3,4-d]pyrimidine.

[1192] In embodiments, a CAR-expressing cell described herein is administered to a subject in combination with a phosphoinositide 3-kinase (PI3K) inhibitor (e.g., a PI3K inhibitor described herein, e.g., idelalisib or duvelisib) and/or rituximab. In embodiments, a CAR-expressing cell described herein is administered to a subject in combination with idelalisib and rituximab. In embodiments, a CAR-expressing cell described herein is administered to a subject in combination with duvelisib and rituximab. Idelalisib (also called GS-1101 or CAL-101; Gilead) is a small molecule that blocks the delta isoform of PI3K. The structure of idelalisib (5-Fluoro-3-phenyl-2-[(1S)-1-(7H-purin-6-ylamino)propyl]-4(3H)-quinazolinone) is shown below.

[chemical structure]

[1193] Duvelisib (also called IPI-145; Infinity Pharmaceuticals and Abbvie) is a small molecule that blocks PI3K-δ,γ. The structure of duvelisib (8-Chloro-2-phenyl-3-[(1S)-1-(9H-purin-6-ylamino)ethyl]-1(2H)-isoquinolinone) is shown below.

[chemical structure]

[1194] In embodiments, the subject has CLL. In embodiments, the subject has relapsed CLL, e.g., the subject has previously been administered a cancer therapy (e.g., previously been administered an anti-CD20 antibody or previously been administered ibrutinib). For example, the subject has a deletion in the short arm of chromosome 17 (del(17p), e.g., in a leukemic cell). In other examples, the subject does not have a del(17p). In embodiments, the subject comprises a leukemic cell comprising a mutation in the immunoglobulin heavy-chain variable-region (IgV_{H}) gene. In other embodiments, the subject does not comprise a leukemic cell comprising a mutation in the immunoglobulin heavy-chain variable-region (IgV_{H}) gene. In embodiments, the subject has a deletion in the long arm of chromosome 11 (del(11q)). In other embodiments, the subject does not have a del(11q). In embodiments, idelalisib is administered at a dosage of about 100-400 mg (e.g., 100-125, 125-150, 150-175, 175-200, 200-225, 225-250, 250-275, 275-300, 325-350, 350-375, or 375-400 mg), e.g., BID. In embodiments, duvelisib is administered at a dosage of about 15-100 mg (e.g., about 15-25, 25-50, 50-75, or 75-100 mg), e.g., twice a day. In embodiments, rituximab is administered at a dosage of about 350-550 mg/m² (e.g., 350-375, 375-400, 400-425, 425-450, 450-475, or 475-500 mg/m²), e.g., intravenously.

[1195] In one embodiment, the kinase inhibitor is a dual phosphatidylinositol 3-kinase (PI3K) and mTOR inhibitor selected from 2-Amino-8-[trans-4-(2-hydroxyethoxy)cyclohexyl]-6-(6-methoxy-3-pyridinyl)-4-methyl-pyrido[2,3-d]pyrimidin-7(8H)-one (PF-04691502); N-[4-[[4-(Dimethylamino)-1-piperidinyl]carbonyl]phenyl]-N-[4-(4,6-di-4-morpholinyl-1,3,5-triazin-2-yl)phenyl]urea (PF-05212384, PKI-587); 2-Methyl-2-{4-[3-methyl-2-oxo-8-(quinolin-3-yl)-2,3-dihydro-1H-imidazo[4,5-c]quinolin-1-yl]phenyl}propanenitrile (BEZ-235); apitolisib (GDC-0980, RG7422); 2,4-Difluoro-N-{2-(methyloxy)-5-[4-(4-pyridazinyl)-6-quinolinyl]-3-pyridinyl}benzenesulfonamide (GSK2126458); 8-(6-methoxypyridin-3-yl)-3-methyl-1-(4-(piperazin-1-yl)-3-(trifluoromethyl)phenyl)-1H-imidazo[4,5-c]quinolin-2(3H)-one Maleic acid (NVP-BGT226); 3-[4-(4-Morpholinylpyrido[3′,2′:4,5]furo[3,2-d]pyrimidin-2-yl]phenol (PI-103); 5-(9-isopropyl-8-methyl-2-morpholino-9H-purin-6-yl)pyrimidin-2-amine (VS-5584, SB2343); and N-[2-[(3,5-Dimethoxyphenyl)amino]quinoxalin-3-yl]-4-[(4-methyl-3-methoxyphenyl)carbonyl]aminophenylsulfonamide (XL765).

[1196] In embodiments, a CAR-expressing cell described herein is administered to a subject in combination with an anaplastic lymphoma kinase (ALK) inhibitor. Exemplary ALK kinases include but are not limited to crizotinib (Pfizer), ceritinib (Novartis), alectinib (Chugai), brigatinib (also called AP26113; Ariad), entrectinib (Ignyta), PF-06463922 (Pfizer), TSR-011 (Tesaro) (see, e.g., Clinical Trial Identifier No. NCT02048488), CEP-37440 (Teva), and X-396 (Xcovery). In some embodiments, the subject has a solid cancer, e.g., a solid cancer described herein, e.g., lung cancer.

[1197] The chemical name of crizotinib is 3-[(1R)-1-(2,6-dichloro-3-fluorophenyl)ethoxy]-5-(1-piperidin-4-ylpyrazol-4-yl)pyridin-2-amine. The chemical name of ceritinib is 5-Chloro-N²-[2-isopropoxy-5-methyl-4-(4-piperidinyl)phenyl]-N⁴-[2-(isopropylsulfonyl)phenyl]-2,4-pyrimidinediamine. The chemical name of alectinib is 9-ethyl-6,6-dimethyl-8-(4-morpholinopiperidin-1-yl)-11-oxo-6,11-dihydro-5H-benzo[b]carbazole-3-carbonitrile. The chemical name of brigatinib is 5-Chloro-N²-{4-[4-(dimethylamino)-1-piperidinyl]-2-methoxyphenyl}-N⁴-[2-(dimethylphosphoryl)phenyl]-2,4-pyrimidinediamine. The chemical name of entrectinib is N-(5-(3,5-difluorobenzyl)-1H-indazol-3-yl)-4-(4-methylpiperazin-1-yl)-2-((tetrahydro-2H-pyran-4-yl)amino)benzamide. The chemical name of PF-06463922 is (10R)-7-Amino-12-fluoro-2,10,16-trimethyl-15-oxo-10,15,16,17-tetrahydro-2H-8,4-(metheno)pyrazolo[4,3-h][2,5,11]-benzoxadiazacyclotetradecine-3-carbonitrile. The chemical structure of CEP-37440 is (S)-2-((5-chloro-2-((6-(4-(2-hydroxyethyl)piperazin-1-yl)-1-methoxy-6,7,8,9-tetrahydro-5H-benzo[7]annulen-2-yl)amino)pyrimidin-4-yl)amino)-N-methylbenzamide. The chemical name of X-396 is (R)-6-amino-5-(1-(2,6-dichloro-3-fluorophenyl)ethoxy)-N-(4-(4-methylpiperazine-1-carbonyl)phenyl)pyridazine-3-carboxamide.

[1198] Drugs that inhibit either the calcium dependent phosphatase calcineurin (cyclosporine and FK506) or inhibit the p70S6 kinase that is important for growth factor induced signaling (rapamycin). (Liu et al., Cell 66:807-815, 1991; Henderson et al., Immun. 73:316-321, 1991; Bierer et al., Curr. Opin. Immun. 5:763-773, 1993) can also be used. In a further aspect, the cell compositions of the present invention may be administered to a patient in conjunction with (e.g., before, simultaneously or following) bone marrow transplantation, T cell ablative therapy using chemotherapy agents such as, fludarabine, external-beam radiation therapy (XRT), cyclophosphamide, and/or antibodies such as OKT3 or CAMPATH. In one aspect, the cell compositions of the present invention are administered following B-cell ablative therapy such as agents that react with CD20, e.g., Rituxan. For example, in one embodiment, subjects may undergo standard treatment with high dose chemotherapy followed by peripheral blood stem cell transplantation. In certain embodiments, following the transplant, subjects receive an infusion of the expanded immune cells of the present invention. In an additional embodiment, expanded cells are administered before or following surgery.

[1199] In embodiments, a CAR-expressing cell described herein is administered to a subject in combination with an indoleamine 2,3-dioxygenase (IDO) inhibitor. IDO is an enzyme that catalyzes the degradation of the amino acid, L-tryptophan, to kynurenine. Many cancers overexpress IDO, e.g., prostatic, colorectal, pancreatic, cervical, gastric, ovarian, head, and lung cancer. pDCs, macrophages, and dendritic cells (DCs) can express IDO. Without being bound by theory, it is thought that a decrease in L-tryptophan (e.g., catalyzed by IDO) results in an immunosuppressive milieu by inducing T-cell anergy and apoptosis. Thus, without being bound by theory, it is thought that an IDO inhibitor can enhance the efficacy of a CAR-expressing cell described herein, e.g., by decreasing the suppression or death of a CAR-expressing immune cell. In embodiments, the subject has a solid tumor, e.g., a solid tumor described herein, e.g., prostatic, colorectal, pancreatic, cervical, gastric, ovarian, head, or lung cancer. Exemplary inhibitors of IDO include but are not limited to 1-methyl-tryptophan, indoximod (NewLink Genetics) (see, e.g., Clinical Trial Identifier Nos. NCT01191216; NCT01792050), and INCB024360 (Incyte Corp.) (see, e.g., Clinical Trial Identifier Nos. NCT01604889; NCT01685255).

[1200] In embodiments, a CAR-expressing cell described herein is administered to a subject in combination with a modulator of myeloid-derived suppressor cells (MDSCs). MDSCs accumulate in the periphery and at the tumor site of many solid tumors. These cells suppress T cell responses, thereby hindering the efficacy of CAR-expressing cell therapy. Without being bound by theory, it is thought that administration of a MDSC modulator enhances the efficacy of a CAR-expressing cell described herein. In an embodiment, the subject has a solid tumor, e.g., a solid tumor described herein, e.g., glioblastoma. Exemplary modulators of MDSCs include but are not limited to MCS110 and BLZ945. MCS110 is a monoclonal antibody (mAb) against macrophage colony-stimulating factor (M-CSF). See, e.g., Clinical Trial Identifier No. NCT00757757. BLZ945 is a small molecule inhibitor of colony stimulating factor 1 receptor (CSF1R). See, e.g., Pyonteck et al. Nat. Med. 19(2013):1264-72. The structure of BLZ945 is shown below.

[chemical structure]

[1201] In embodiments, a CAR-expressing cell described herein is administered to a subject in combination with a CD19 CART cell (e.g., CTL019, e.g., as described in WO2012/079000, incorporated herein by reference). In embodiments, the subject has a CD19+ lymphoma, e.g., a CD19+ Non-Hodgkin's Lymphoma (NHL), a CD19+FL, or a CD19+ DLBCL. In embodiments, the subject has a relapsed or refractory CD19+ lymphoma. In embodiments, a lymphodepleting chemotherapy is administered to the subject prior to, concurrently with, or after administration (e.g., infusion) of CD19 CART cells. In an example, the lymphodepleting chemotherapy is administered to the subject prior to administration of CD19 CART cells. For example, the lymphodepleting chemotherapy ends 1-4 days (e.g., 1, 2, 3, or 4 days) prior to CD19 CART cell infusion. In embodiments, multiple doses of CD19 CART cells are administered, e.g., as described herein. For example, a single dose comprises about 5×10⁸ CD19 CART cells. In embodiments, a lymphodepleting chemotherapy is administered to the subject prior to, concurrently with, or after administration (e.g., infusion) of a CAR-expressing cell described herein, e.g., a non-CD19 CAR-expressing cell. In embodiments, a CD19 CART is administered to the subject prior to, concurrently with, or after administration (e.g., infusion) of a non-CD19 CAR-expressing cell, e.g., a non-CD19 CAR-expressing cell described herein.

[1202] In some embodiments, a CAR-expressing cell described herein is administered to a subject in combination with a interleukin-15 (IL-15) polypeptide, a interleukin-15 receptor alpha (IL-15Ra) polypeptide, or a combination of both a IL-15 polypeptide and a IL-15Ra polypeptide e.g., hetIL-15 (Admune Therapeutics, LLC). hetIL-15 is a heterodimeric non-covalent complex of IL-15 and IL-15Ra. hetIL-15 is described in, e.g., U.S. Pat. No. 8,124,084, U.S. 2012/0177598, U.S. 2009/0082299, U.S. 2012/0141413, and U.S. 2011/0081311, incorporated herein by reference. In embodiments, het-IL-15 is administered subcutaneously. In embodiments, the subject has a cancer, e.g., solid cancer, e.g., melanoma or colon cancer. In embodiments, the subject has a metastatic cancer.

[1203] In one embodiment, the subject can be administered an agent which reduces or ameliorates a side effect associated with the administration of a CAR-expressing cell. Side effects associated with the administration of a CAR-expressing cell include, but are not limited to CRS, and hemophagocytic lymphohistiocytosis (HLH), also termed Macrophage Activation Syndrome (MAS). Symptoms of CRS include high fevers, nausea, transient hypotension, hypoxia, and the like. CRS may include clinical constitutional signs and symptoms such as fever, fatigue, anorexia, myalgias, arthalgias, nausea, vomiting, and headache. CRS may include clinical skin signs and symptoms such as rash. CRS may include clinical gastrointestinal signs and symptoms such as nausea, vomiting and diarrhea. CRS may include clinical respiratory signs and symptoms such as tachypnea and hypoxemia. CRS may include clinical cardiovascular signs and symptoms such as tachycardia, widened pulse pressure, hypotension, increased cardiac output (early) and potentially diminished cardiac output (late). CRS may include clinical coagulation signs and symptoms such as elevated d-dimer, hypofibrinogenemia with or without bleeding. CRS may include clinical renal signs and symptoms such as azotemia. CRS may include clinical hepatic signs and symptoms such as transaminitis and hyperbilirubinemia. CRS may include clinical neurologic signs and symptoms such as headache, mental status changes, confusion, delirium, word finding difficulty or frank aphasia, hallucinations, tremor, dymetria, altered gait, and seizures.

[1204] Accordingly, the methods described herein can comprise administering a CAR-expressing cell described herein to a subject and further administering one or more agents to manage elevated levels of a soluble factor resulting from treatment with a CAR-expressing cell. In one embodiment, the soluble factor elevated in the subject is one or more of IFN-γ, TNFa, IL-2 and IL-6. In an embodiment, the factor elevated in the subject is one or more of IL-1, GM-CSF, IL-10, IL-8, IL-5 and fraktalkine. Therefore, an agent administered to treat this side effect can be an agent that neutralizes one or more of these soluble factors. In one embodiment, the agent that neutralizes one or more of these soluble forms is an antibody or antigen binding fragment thereof. Examples of such agents include, but are not limited to a steroid (e.g., corticosteroid), an inhibitor of TNFa, and an inhibitor of IL-6. An example of a TNFa inhibitor is an anti-TNFa antibody molecule such as, infliximab, adalimumab, certolizumab pegol, and golimumab. Another example of a TNFa inhibitor is a fusion protein such as entanercept. Small molecule inhibitors of TNFa include, but are not limited to, xanthine derivatives (e.g. pentoxifylline) and bupropion. An example of an IL-6 inhibitor is an anti-IL-6 antibody molecule or an anti-IL-6 receptor antibody molecule such as tocilizumab (toc), sarilumab, elsilimomab, CNTO 328, ALD518/BMS-945429, CNTO 136, CPSI-2364, CDP6038, VX30, ARGX-109, FE301, and FM101. In one embodiment, the anti-IL-6 receptor antibody molecule is tocilizumab. An example of an IL-1R based inhibitor is anakinra.

[1205] In one embodiment, the subject can be administered an agent which enhances the activity of a CAR-expressing cell. For example, in one embodiment, the agent can be an agent which inhibits an inhibitory molecule. Inhibitory molecules, e.g., Programmed Death 1 (PD-1), can, in some embodiments, decrease the ability of a CAR-expressing cell to mount an immune effector response. Examples of inhibitory molecules include PD-1, PD-L1, CTLA-4, TIM-3, CEACAM (e.g., CEACAM-1, CEACAM-3 and/or CEACAM-5), LAG-3, VISTA, BTLA, TIGIT, LAIR1, CD160, 2B4 and TGF beta. Inhibition of an inhibitory molecule, e.g., by inhibition at the DNA, RNA or protein level, can optimize a CAR-expressing cell performance. In embodiments, an inhibitory nucleic acid, e.g., an inhibitory nucleic acid, e.g., a dsRNA, e.g., an siRNA or shRNA, a clustered regularly interspaced short palindromic repeats (CRISPR), a transcription-activator like effector nuclease (TALEN), or a zinc finger endonuclease (ZFN), e.g., as described herein, can be used to inhibit expression of an inhibitory molecule in the CAR-expressing cell. In an embodiment the inhibitor is an shRNA. In an embodiment, the inhibitory molecule is inhibited within a CAR-expressing cell. In these embodiments, a dsRNA molecule that inhibits expression of the inhibitory molecule is linked to the nucleic acid that encodes a component, e.g., all of the components, of the CAR. In one embodiment, the inhibitor of an inhibitory signal can be, e.g., an antibody or antibody fragment that binds to an inhibitory molecule. For example, the agent can be an antibody or antibody fragment that binds to PD-1, PD-L1, PD-L2 or CTLA4 (e.g., ipilimumab (also referred to as MDX-010 and MDX-101, and marketed as Yervoy®; Bristol-Myers Squibb; Tremelimumab (IgG2 monoclonal antibody available from Pfizer, formerly known as ticilimumab, CP-675,206).). In an embodiment, the agent is an antibody or antibody fragment that binds to TIM3. In an embodiment, the agent is an antibody or antibody fragment that binds to CEACAM (CEACAM-1, CEACAM-3, and/or CEACAM-5). In an embodiment, the agent is an antibody or antibody fragment that binds to LAG3.

[1206] PD-1 is an inhibitory member of the CD28 family of receptors that also includes CD28, CTLA-4, ICOS, and BTLA. PD-1 is expressed on activated B cells, T cells and myeloid cells (Agata et al. 1996 Int. Immunol 8:765-75). Two ligands for PD-1, PD-L1 and PD-L2 have been shown to downregulate T cell activation upon binding to PD-1 (Freeman et a. 2000 J Exp Med 192:1027-34; Latchman et al. 2001 Nat Immunol 2:261-8; Carter et al. 2002 Eur J Immunol 32:634-43). PD-L1 is abundant in human cancers (Dong et al. 2003 J Mol Med 81:281-7; Blank et al. 2005 Cancer Immunol. Immunother 54:307-314; Konishi et al. 2004 Clin Cancer Res 10:5094). Immune suppression can be reversed by inhibiting the local interaction of PD-1 with PD-L1. Antibodies, antibody fragments, and other inhibitors of PD-1, PD-L1 and PD-L2 are available in the art and may be used combination with a cars of the present invention described herein. For example, nivolumab (also referred to as BMS-936558 or MDX1106; Bristol-Myers Squibb) is a fully human IgG4 monoclonal antibody which specifically blocks PD-1. Nivolumab (clone 5C4) and other human monoclonal antibodies that specifically bind to PD-1 are disclosed in U.S. Pat. No. 8,008,449 and WO2006/121168. Pidilizumab (CT-011; Cure Tech) is a humanized IgG1k monoclonal antibody that binds to PD-1. Pidilizumab and other humanized anti-PD-1 monoclonal antibodies are disclosed in WO2009/101611. Pembrolizumab (formerly known as lambrolizumab, and also referred to as MK03475; Merck) is a humanized IgG4 monoclonal antibody that binds to PD-1. Pembrolizumab and other humanized anti-PD-1 antibodies are disclosed in U.S. Pat. No. 8,354,509 and WO2009/114335. MEDI4736 (Medimmune) is a human monoclonal antibody that binds to PDL1, and inhibits interaction of the ligand with PD1. MDPL3280A (Genentech/Roche) is a human Fc optimized IgG1 monoclonal antibody that binds to PD-L1. MDPL3280A and other human monoclonal antibodies to PD-L1 are disclosed in U.S. Pat. No. 7,943,743 and U.S Publication No.: 20120039906. Other anti-PD-L1 binding agents include YW243.55.570 (heavy and light chain variable regions are shown in SEQ ID NOs 20 and 21 in WO2010/077634) and MDX-1 105 (also referred to as BMS-936559, and, e.g., anti-PD-L1 binding agents disclosed in WO2007/005874). AMP-224 (B7-DCIg; Amplimmune; e.g., disclosed in WO2010/027827 and WO2011/066342), is a PD-L2 Fc fusion soluble receptor that blocks the interaction between PD-1 and B7-H1. Other anti-PD-1 antibodies include AMP 514 (Amplimmune), among others, e.g., anti-PD-1 antibodies disclosed in U.S. Pat. No. 8,609,089, US 2010028330, and/or US 20120114649.

[1207] TIM-3 (T cell immunoglobulin-3) also negatively regulates T cell function, particularly in IFN-g-secreting CD4+T helper 1 and CD8+T cytotoxic 1 cells, and plays a critical role in T cell exhaustion. Inhibition of the interaction between TIM3 and its ligands, e.g., galectin-9 (Gal9), phosphotidylserine (PS), and HMGB1, can increase immune response. Antibodies, antibody fragments, and other inhibitors of TIM3 and its ligands are available in the art and may be used combination with a CD19 CAR described herein. For example, antibodies, antibody fragments, small molecules, or peptide inhibitors that target TIM3 binds to the IgV domain of TIM3 to inhibit interaction with its ligands. Antibodies and peptides that inhibit TIM3 are disclosed in WO2013/006490 and US20100247521. Other anti-TIM3 antibodies include humanized versions of RMT3-23 (disclosed in Ngiow et al., 2011, Cancer Res, 71:3540-3551), and clone 8B.2C12 (disclosed in Monney et al., 2002, Nature, 415:536-541). Bi-specific antibodies that inhibit TIM3 and PD-1 are disclosed in US20130156774.

[1208] In other embodiments, the agent that enhances the activity of a CAR-expressing cell is a CEACAM inhibitor (e.g., CEACAM-1, CEACAM-3, and/or CEACAM-5 inhibitor). In one embodiment, the inhibitor of CEACAM is an anti-CEACAM antibody molecule. Exemplary anti-CEACAM-1 antibodies are described in WO 2010/125571, WO 2013/082366 WO 2014/059251 and WO 2014/022332, e.g., a monoclonal antibody 34B1, 26H7, and 5F4; or a recombinant form thereof, as described in, e.g., US 2004/0047858, U.S. Pat. No. 7,132,255 and WO 99/052552. In other embodiments, the anti-CEACAM antibody binds to CEACAM-5 as described in, e.g., Zheng et al. PLoS One. 2010 Sep. 2; 5(9). pii: e12529 (DOI:10:1371/journal.pone.0021146), or crossreacts with CEACAM-1 and CEACAM-5 as described in, e.g., WO 2013/054331 and US 2014/0271618.

[1209] Without wishing to be bound by theory, carcinoembryonic antigen cell adhesion molecules (CEACAM), such as CEACAM-1 and CEACAM-5, are believed to mediate, at least in part, inhibition of an anti-tumor immune response (see e.g., Markel et al. J Immunol. 2002 Mar. 15; 168(6):2803-10; Markel et al. J Immunol. 2006 Nov. 1; 177(9):6062-71; Markel et al. Immunology. 2009 February; 126(2):186-200; Markel et al. Cancer Immunol Immunother. 2010 February; 59(2):215-30; Ortenberg et al. Mol Cancer Ther. 2012 June; 11(6):1300-10; Stem et al. J Immunol. 2005 Jun. 1; 174(11):6692-701; Zheng et al. PLoS One. 2010 Sep. 2; 5(9). pii: e12529). For example, CEACAM-1 has been described as a heterophilic ligand for TIM-3 and as playing a role in TIM-3-mediated T cell tolerance and exhaustion (see e.g., WO 2014/022332; Huang, et al. (2014) Nature doi:10.1038/nature13848). In embodiments, co-blockade of CEACAM-1 and TIM-3 has been shown to enhance an anti-tumor immune response in xenograft colorectal cancer models (see e.g., WO 2014/022332; Huang, et al. (2014), supra). In other embodiments, co-blockade of CEACAM-1 and PD-1 reduce T cell tolerance as described, e.g., in WO 2014/059251. Thus, CEACAM inhibitors can be used with the other immunomodulators described herein (e.g., anti-PD-1 and/or anti-TIM-3 inhibitors) to enhance an immune response against a cancer, e.g., a melanoma, a lung cancer (e.g., NSCLC), a bladder cancer, a colon cancer an ovarian cancer, and other cancers as described herein.

[1210] LAG-3 (lymphocyte activation gene-3 or CD223) is a cell surface molecule expressed on activated T cells and B cells that has been shown to play a role in CD8+ T cell exhaustion. Antibodies, antibody fragments, and other inhibitors of LAG-3 and its ligands are available in the art and may be used combination with a CD19 CAR described herein. For example, BMS-98601 6 (Bristol-Myers Squib) is a monoclonal antibody that targets LAG3. IMP701 (Immutep) is an antagonist LAG-3 antibody and IMP731 (Immutep and GlaxoSmithKline) is a depleting LAG-3 antibody. Other LAG-3 inhibitors include IMP321 (Immutep), which is a recombinant fusion protein of a soluble portion of LAC3 and Ig that binds to MHC class II molecules and activates antigen presenting cells (APC). Other antibodies are disclosed, e.g., in WO2010/019570.

[1211] In some embodiments, the agent which enhances the activity of a CAR-expressing cell can be, e.g., a fusion protein comprising a first domain and a second domain, wherein the first domain is an inhibitory molecule, or fragment thereof, and the second domain is a polypeptide that is associated with a positive signal, e.g., a polypeptide comprising an intracellular signaling domain as described herein. In some embodiments, the polypeptide that is associated with a positive signal can include a costimulatory domain of CD28, CD27, ICOS, e.g., an intracellular signaling domain of CD28, CD27 and/or ICOS, and/or a primary signaling domain, e.g., of CD3 zeta, e.g., described herein. In one embodiment, the fusion protein is expressed by the same cell that expressed the CAR. In another embodiment, the fusion protein is expressed by a cell, e.g., a T cell that does not express a CAR of the present invention.

[1212] In one embodiment, the agent which enhances activity of a CAR-expressing cell described herein is miR-17-92.

[1213] In one embodiment, the agent which enhances activity of a CAR-described herein is a cytokine. Cytokines have important functions related to T cell expansion, differentiation, survival, and homeostasis. Cytokines that can be administered to the subject receiving a CAR-expressing cell described herein include: IL-2, IL-4, IL-7, IL-9, IL-15, IL-18, and IL-21, or a combination thereof. In preferred embodiments, the cytokine administered is IL-7, IL-15, or IL-21, or a combination thereof. The cytokine can be administered once a day or more than once a day, e.g., twice a day, three times a day, or four times a day. The cytokine can be administered for more than one day, e.g. the cytokine is administered for 2 days, 3 days, 4 days, 5 days, 6 days, 1 week, 2 weeks, 3 weeks, or 4 weeks. For example, the cytokine is administered once a day for 7 days.

[1214] In embodiments, the cytokine is administered in combination with CAR-expressing T cells. The cytokine can be administered simultaneously or concurrently with the CAR-expressing T cells, e.g., administered on the same day. The cytokine may be prepared in the same pharmaceutical composition as the CAR-expressing T cells, or may be prepared in a separate pharmaceutical composition. Alternatively, the cytokine can be administered shortly after administration of the CAR-expressing T cells, e.g., 1 day, 2 days, 3 days, 4 days, 5 days, 6 days, or 7 days after administration of the CAR-expressing T cells. In embodiments where the cytokine is administered in a dosing regimen that occurs over more than one day, the first day of the cytokine dosing regimen can be on the same day as administration with the CAR-expressing T cells, or the first day of the cytokine dosing regimen can be 1 day, 2 days, 3 days, 4 days, 5 days, 6 days, or 7 days after administration of the CAR-expressing T cells. In one embodiment, on the first day, the CAR-expressing T cells are administered to the subject, and on the second day, a cytokine is administered once a day for the next 7 days. In a preferred embodiment, the cytokine to be administered in combination with CAR-expressing T cells is IL-7, IL-15, or IL-21.

[1215] In other embodiments, the cytokine is administered a period of time after administration of CAR-expressing cells, e.g., at least 2 weeks, 3 weeks, 4 weeks, 6 weeks, 8 weeks, 10 weeks, 12 weeks, 4 months, 5 months, 6 months, 7 months, 8 months, 9 months, 10 months, 11 months, or 1 year or more after administration of CAR-expressing cells. In one embodiment, the cytokine is administered after assessment of the subject's response to the CAR-expressing cells. For example, the subject is administered CAR-expressing cells according to the dosage and regimens described herein. The response of the subject to CAR-expressing cell therapy is assessed at 2 weeks, 3 weeks, 4 weeks, 6 weeks, 8 weeks, 10 weeks, 12 weeks, 4 months, 5 months, 6 months, 7 months, 8 months, 9 months, 10 months, 11 months, or 1 year or more after administration of CAR-expressing cells, using any of the methods described herein, including inhibition of tumor growth, reduction of circulating tumor cells, or tumor regression. Subjects that do not exhibit a sufficient response to CAR-expressing cell therapy can be administered a cytokine. Administration of the cytokine to the subject that has sub-optimal response to the CAR-expressing cell therapy improves CAR-expressing cell efficacy or anti-cancer activity. In a preferred embodiment, the cytokine administered after administration of CAR-expressing cells is IL-7.

Combination with a Low Dose of an mTOR Inhibitor

[1216] In one embodiment, the cells expressing a CAR molecule, e.g., a CAR molecule described herein, are administered in combination with a low, immune enhancing dose of an mTOR inhibitor.

[1217] In an embodiment, a dose of an mTOR inhibitor is associated with, or provides, mTOR inhibition of at least 5 but no more than 90%, at least 10 but no more than 90%, at least 15, but no more than 90%, at least 20 but no more than 90%, at least 30 but no more than 90%, at least 40 but no more than 90%, at least 50 but no more than 90%, at least 60 but no more than 90%, or at least 70 but no more than 90%.

[1218] In an embodiment, a dose of an mTOR inhibitor is associated with, or provides, mTOR inhibition of at least 5 but no more than 80%, at least 10 but no more than 80%, at least 15, but no more than 80%, at least 20 but no more than 80%, at least 30 but no more than 80%, at least 40 but no more than 80%, at least 50 but no more than 80%, or at least 60 but no more than 80%.

[1219] In an embodiment, a dose of an mTOR inhibitor is associated with, or provides, mTOR inhibition of at least 5 but no more than 70%, at least 10 but no more than 70%, at least 15, but no more than 70%, at least 20 but no more than 70%, at least 30 but no more than 70%, at least 40 but no more than 70%, or at least 50 but no more than 70%.

[1220] In an embodiment, a dose of an mTOR inhibitor is associated with, or provides, mTOR inhibition of at least 5 but no more than 60%, at least 10 but no more than 60%, at least 15, but no more than 60%, at least 20 but no more than 60%, at least 30 but no more than 60%, or at least 40 but no more than 60%.

[1221] In an embodiment, a dose of an mTOR inhibitor is associated with, or provides, mTOR inhibition of at least 5 but no more than 50%, at least 10 but no more than 50%, at least 15, but no more than 50%, at least 20 but no more than 50%, at least 30 but no more than 50%, or at least 40 but no more than 50%.

[1222] In an embodiment, a dose of an mTOR inhibitor is associated with, or provides, mTOR inhibition of at least 5 but no more than 40%, at least 10 but no more than 40%, at least 15, but no more than 40%, at least 20 but no more than 40%, at least 30 but no more than 40%, or at least 35 but no more than 40%.

[1223] In an embodiment, a dose of an mTOR inhibitor is associated with, or provides, mTOR inhibition of at least 5 but no more than 30%, at least 10 but no more than 30%, at least 15, but no more than 30%, at least 20 but no more than 30%, or at least 25 but no more than 30%.

[1224] In an embodiment, a dose of an mTOR inhibitor is associated with, or provides, mTOR inhibition of at least 1, 2, 3, 4 or 5 but no more than 20%, at least 1, 2, 3, 4 or 5 but no more than 30%, at least 1, 2, 3, 4 or 5, but no more than 35, at least 1, 2, 3, 4 or 5 but no more than 40%, or at least 1, 2, 3, 4 or 5 but no more than 45%.

[1225] In an embodiment, a dose of an mTOR inhibitor is associated with, or provides, mTOR inhibition of at least 1, 2, 3, 4 or 5 but no more than 90%.

[1226] As is discussed herein, the extent of mTOR inhibition can be expressed as the extent of P70 S6 kinase inhibition, e.g., the extent of mTOR inhibition can be determined by the level of decrease in P70 S6 kinase activity, e.g., by the decrease in phosphorylation of a P70 S6 kinase substrate. The level of mTOR inhibition can be evaluated by a method described herein, e.g. by the Boulay assay, or measurement of phosphorylated S6 levels by western blot.

Exemplary mTOR Inhibitors

[1227] As used herein, the term “mTOR inhibitor” refers to a compound or ligand, or a pharmaceutically acceptable salt thereof, which inhibits the mTOR kinase in a cell. In an embodiment an mTOR inhibitor is an allosteric inhibitor. In an embodiment an mTOR inhibitor is a catalytic inhibitor.

[1228] Allosteric mTOR inhibitors include the neutral tricyclic compound rapamycin (sirolimus), rapamycin-related compounds, that is compounds having structural and functional similarity to rapamycin including, e.g., rapamycin derivatives, rapamycin analogs (also referred to as rapalogs) and other macrolide compounds that inhibit mTOR activity.

[1229] Rapamycin is a known macrolide antibiotic produced by Streptomyces hygroscopicus having the structure shown in Formula A.

[chemical structure]

[1230] See, e.g., McAlpine, J. B., et al., J. Antibiotics (1991) 44: 688; Schreiber, S. L., et al., J. Am. Chem. Soc. (1991) 113: 7433; U.S. Pat. No. 3,929,992. There are various numbering schemes proposed for rapamycin. To avoid confusion, when specific rapamycin analogs are named herein, the names are given with reference to rapamycin using the numbering scheme of formula A.

[1231] Rapamycin analogs useful in the invention are, for example, O-substituted analogs in which the hydroxyl group on the cyclohexyl ring of rapamycin is replaced by OR₁ in which R₁ is hydroxyalkyl, hydroxyalkoxyalkyl, acylaminoalkyl, or aminoalkyl; e.g. RAD001, also known as, everolimus as described in U.S. Pat. No. 5,665,772 and WO94/09010 the contents of which are incorporated by reference. Other suitable rapamycin analogs include those substituted at the 26- or 28-position. The rapamycin analog may be an epimer of an analog mentioned above, particularly an epimer of an analog substituted in position 40, 28 or 26, and may optionally be further hydrogenated, e.g. as described in U.S. Pat. No. 6,015,815, WO95/14023 and WO99/15530 the contents of which are incorporated by reference, e.g. ABT578 also known as zotarolimus or a rapamycin analog described in U.S. Pat. No. 7,091,213, WO98/02441 and WO01/14387 the contents of which are incorporated by reference, e.g. AP23573 also known as ridaforolimus.

[1232] Examples of rapamycin analogs suitable for use in the present invention from U.S. Pat. No. 5,665,772 include, but are not limited to, 40-O-benzyl-rapamycin, 40-O-(4′-hydroxymethyl)benzyl-rapamycin, 40-O-[4′-(1,2-dihydroxyethyl)]benzyl-rapamycin, 40-O-allyl-rapamycin, 40-O-[3′-(2,2-dimethyl-1,3-dioxolan-4(S)-yl)-prop-2′-en-1′-yl]-rapamycin, (2′E,4'S)-40-O-(4′,5′-dihydroxypent-2′-en-1′-yl)-rapamycin, 40-O-(2-hydroxy)ethoxycarbonylmethyl-rapamycin, 40-O-(2-hydroxy)ethyl-rapamycin, 40-O-(3-hydroxy)propyl-rapamycin, 40-O-(6-hydroxy)hexyl-rapamycin, 40-O-[2-(2-hydroxy)ethoxy]ethyl-rapamycin, 40-O-[(3S)-2,2-dimethyldioxolan-3-yl]methyl-rapamycin, 40-O-[(2S)-2,3-dihydroxyprop-1-yl]-rapamycin, 40-O-(2-acetoxy)ethyl-rapamycin, 40-O-(2-nicotinoyloxy)ethyl-rapamycin, 40-O-[2-(N-morpholino)acetoxy]ethyl-rapamycin, 40-O-(2-N-imidazolylacetoxy)ethyl-rapamycin, 40-O-[2-(N-methyl-N′-piperazinyl)acetoxy]ethyl-rapamycin, 39-O-desmethyl-39,40-0,O-ethylene-rapamycin, (26R)-26-dihydro-40-O-(2-hydroxy)ethyl-rapamycin, 40-O-(2-aminoethyl)-rapamycin, 40-0-(2-acetaminoethyl)-rapamycin, 40-O-(2-nicotinamidoethyl)-rapamycin, 40-O-(2-(N-methyl-imidazo-2′-ylcarbethoxamido)ethyl)-rapamycin, 40-O-(2-ethoxycarbonylaminoethyl)-rapamycin, 40-O-(2-tolylsulfonamidoethyl)-rapamycin and 40-O-[2-(4′,5′-dicarboethoxy-1′,2′,3′-triazol-1′-yl)-ethyl]-rapamycin.

[1233] Other rapamycin analogs useful in the present invention are analogs where the hydroxyl group on the cyclohexyl ring of rapamycin and/or the hydroxy group at the 28 position is replaced with an hydroxyester group are known, for example, rapamycin analogs found in U.S. RE44,768, e.g. temsirolimus.

[1234] Other rapamycin analogs useful in the preset invention include those wherein the methoxy group at the 16 position is replaced with another substituent, preferably (optionally hydroxy-substituted) alkynyloxy, benzyl, orthomethoxybenzyl or chlorobenzyl and/or wherein the mexthoxy group at the 39 position is deleted together with the 39 carbon so that the cyclohexyl ring of rapamycin becomes a cyclopentyl ring lacking the 39 position methyoxy group; e.g. as described in WO95/16691 and WO96/41807 the contents of which are incorporated by reference. The analogs can be further modified such that the hydroxy at the 40-position of rapamycin is alkylated and/or the 32-carbonyl is reduced.

[1235] Rapamycin analogs from WO95/16691 include, but are not limited to, 16-demthoxy-16-(pent-2-ynyl)oxy-rapamycin, 16-demthoxy-16-(but-2-ynyl)oxy-rapamycin, 16-demthoxy-16-(propargyl)oxy-rapamycin, 16-demethoxy-16-(4-hydroxy-but-2-ynyl)oxy-rapamycin, 16-demthoxy-16-benzyloxy-40-O-(2-hydroxyethyl)-rapamycin, 16-demthoxy-16-benzyloxy-rapamycin, 16-demethoxy-16-ortho-methoxybenzyl-rapamycin, 16-demethoxy-40-O-(2-methoxyethyl)-16-pent-2-ynyl)oxy-rapamycin, 39-demethoxy-40-desoxy-39-formyl-42-nor-rapamycin, 39-demethoxy-40-desoxy-39-hydroxymethyl-42-nor-rapamycin, 39-demethoxy-40-desoxy-39-carboxy-42-nor-rapamycin, 39-demethoxy-40-desoxy-39-(4-methyl-piperazin-1-yl)carbonyl-42-nor-rapamycin, 39-demethoxy-40-desoxy-39-(morpholin-4-yl)carbonyl-42-nor-rapamycin, 39-demethoxy-40-desoxy-39-[N-methyl, N-(2-pyridin-2-yl-ethyl)]carbamoyl-42-nor-rapamycin and 39-demethoxy-40-desoxy-39-(p-toluenesulfonylhydrazonomethyl)-42-nor-rapamycin.

[1236] Rapamycin analogs from WO96/41807 include, but are not limited to, 32-deoxo-rapamycin, 16-O-pent-2-ynyl-32-deoxo-rapamycin, 16-O-pent-2-ynyl-32-deoxo-40-O-(2-hydroxy-ethyl)-rapamycin, 16-O-pent-2-ynyl-32-(S)-dihydro-40-O-(2-hydroxyethyl)-rapamycin, 32(S)-dihydro-40-O-(2-methoxy)ethyl-rapamycin and 32(S)-dihydro-40-O-(2-hydroxyethyl)-rapamycin.

[1237] Another suitable rapamycin analog is umirolimus as described in US2005/0101624 the contents of which are incorporated by reference.

[1238] RAD001, otherwise known as everolimus (Afinitor®), has the chemical name (1R,9S,12S,15R,16E,18R,19R,21R,23S,24E,26E,28E,30S,32S,35R)-1,18-dihydroxy-12-{(1R)-2-[(1S,3R,4R)-4-(2-hydroxyethoxy)-3-methoxycyclohexyl]-1-methylethyl}-19,30-dimethoxy-15,17,21,23,29,35-hexamethyl-11,36-dioxa-4-aza-tricyclo[30.3.1.04,9]hexatriaconta-16,24,26,28-tetraene-2,3,10,14,20-pentaone

[1239] Further examples of allosteric mTOR inhibitors include sirolimus (rapamycin, AY-22989), 40-[3-hydroxy-2-(hydroxymethyl)-2-methylpropanoate]-rapamycin (also called temsirolimus or CCI-779) and ridaforolimus (AP-23573/MK-8669). Other examples of allosteric mTor inhibtors include zotarolimus (ABT578) and umirolimus.

[1240] Alternatively or additionally, catalytic, ATP-competitive mTOR inhibitors have been found to target the mTOR kinase domain directly and target both mTORC1 and mTORC2. These are also more effective inhibitors of mTORC1 than such allosteric mTOR inhibitors as rapamycin, because they modulate rapamycin-resistant mTORC1 outputs such as 4EBP1-T37/46 phosphorylation and cap-dependent translation.

[1241] Catalytic inhibitors include: BEZ235 or 2-methyl-2-[4-(3-methyl-2-oxo-8-quinolin-3-yl-2,3-dihydro-imidazo[4,5-c]quinolin-1-yl)-phenyl]-propionitrile, or the monotosylate salt form. the synthesis of BEZ235 is described in WO2006/122806; CCG168 (otherwise known as AZD-8055, Chresta, C. M., et al., Cancer Res, 2010, 70(1), 288-298) which has the chemical name {5-[2,4-bis-((S)-3-methyl-morpholin-4-yl)-pyrido[2,3d]pyrimidin-7-yl]-2-methoxy-phenyl}-methanol; 3-[2,4-bis[(3S)-3-methylmorpholin-4-yl]pyrido[2,3-d]pyrimidin-7-yl]-N-methylbenzamide (WO09104019); 3-(2-aminobenzo[d]oxazol-5-yl)-1-isopropyl-1H-pyrazolo[3,4-d]pyrimidin-4-amine (WO10051043 and WO2013023184); A N-(3-(N-(3-((3,5-dimethoxyphenyl)amino)quinoxaline-2-yl)sulfamoyl)phenyl)-3-methoxy-4-methylbenzamide (WO07044729 and WO12006552); PKI-587 (Venkatesan, A. M., J. Med. Chem., 2010, 53, 2636-2645) which has the chemical name 1-[4-[4-(dimethylamino)piperidine-1-carbonyl]phenyl]-3-[4-(4,6-dimorpholino-1,3,5-triazin-2-yl)phenyl]urea; GSK-2126458 (ACS Med. Chem. Lett., 2010, 1, 39-43) which has the chemical name 2,4-difluoro-N-{2-methoxy-5-[4-(4-pyridazinyl)-6-quinolinyl]-3-pyridinyl}benzenesulfonamide; 5-(9-isopropyl-8-methyl-2-morpholino-9H-purin-6-yl)pyrimidin-2-amine (WO10114484); (E)-N-(8-(6-amino-5-(trifluoromethyl)pyridin-3-yl)-1-(6-(2-cyanopropan-2-yl)pyridin-3-yl)-3-methyl-1H-imidazo[4,5-c]quinolin-2(3H)-ylidene)cyanamide (WO12007926).

[1242] Further examples of catalytic mTOR inhibitors include 8-(6-methoxy-pyridin-3-yl)-3-methyl-1-(4-piperazin-1-yl-3-trifluoromethyl-phenyl)-1,3-dihydro-imidazo[4,5-c]quinolin-2-one (WO2006/122806) and Ku-0063794 (Garcia-Martinez J M, et al., Biochem J., 2009, 421(1), 29-42. Ku-0063794 is a specific inhibitor of the mammalian target of rapamycin (mTOR).) WYE-354 is another example of a catalytic mTor inhibitor (Yu K, et al. (2009). Biochemical, Cellular, and In vivo Activity of Novel ATP-Competitive and Selective Inhibitors of the Mammalian Target of Rapamycin. Cancer Res. 69(15): 6232-6240).

[1243] mTOR inhibitors useful according to the present invention also include prodrugs, derivatives, pharmaceutically acceptable salts, or analogs thereof of any of the foregoing.

[1244] mTOR inhibitors, such as RAD001, may be formulated for delivery based on well-established methods in the art based on the particular dosages described herein. In particular, U.S. Pat. No. 6,004,973 (incorporated herein by reference) provides examples of formulations useable with the mTOR inhibitors described herein.

Evaluation of mTOR Inhibition

[1245] mTOR phosphorylates the kinase P70 S6, thereby activating P70 S6 kinase and allowing it to phosphorylate its substrate. The extent of mTOR inhibition can be expressed as the extent of P70 S6 kinase inhibition, e.g., the extent of mTOR inhibition can be determined by the level of decrease in P70 S6 kinase activity, e.g., by the decrease in phosphorylation of a P70 S6 kinase substrate. One can determine the level of mTOR inhibition, by measuring P70 S6 kinase activity (the ability of P70 S6 kinase to phosphorylate a substrate), in the absence of inhibitor, e.g., prior to administration of inhibitor, and in the presences of inhibitor, or after the administration of inhibitor. The level of inhibition of P70 S6 kinase gives the level of mTOR inhibition. Thus, if P70 S6 kinase is inhibited by 40%, mTOR activity, as measured by P70 S6 kinase activity, is inhibited by 40%. The extent or level of inhibition referred to herein is the average level of inhibition over the dosage interval. By way of example, if the inhibitor is given once per week, the level of inhibition is given by the average level of inhibition over that interval, namely a week.

[1246] Boulay et al., Cancer Res, 2004, 64:252-61, hereby incorporated by reference, teaches an assay that can be used to assess the level of mTOR inhibition (referred to herein as the Boulay assay). In an embodiment, the assay relies on the measurement of P70 S6 kinase activity from biological samples before and after administration of an mTOR inhibitor, e.g., RAD001. Samples can be taken at preselected times after treatment with an mTOR inhibitor, e.g., 24, 48, and 72 hours after treatment. Biological samples, e.g., from skin or peripheral blood mononuclear cells (PBMCs) can be used. Total protein extracts are prepared from the samples. P70 S6 kinase is isolated from the protein extracts by immunoprecipitation using an antibody that specifically recognizes the P70 S6 kinase. Activity of the isolated P70 S6 kinase can be measured in an in vitro kinase assay. The isolated kinase can be incubated with 40S ribosomal subunit substrates (which is an endogenous substrate of P70 S6 kinase) and gamma-³²P under conditions that allow phosphorylation of the substrate. Then the reaction mixture can be resolved on an SDS-PAGE gel, and ³²P signal analyzed using a PhosphorImager. A ³²P signal corresponding to the size of the 40S ribosomal subunit indicates phosphorylated substrate and the activity of P70 S6 kinase. Increases and decreases in kinase activity can be calculated by quantifying the area and intensity of the ³²P signal of the phosphorylated substrate (e.g., using ImageQuant, Molecular Dynamics), assigning arbitrary unit values to the quantified signal, and comparing the values from after administration with values from before administration or with a reference value. For example, percent inhibition of kinase activity can be calculated with the following formula: 1-(value obtained after administration/value obtained before administration)×100. As described above, the extent or level of inhibition referred to herein is the average level of inhibition over the dosage interval.

[1247] Methods for the evaluation of kinase activity, e.g., P70 S6 kinase activity, are also provided in U.S. Pat. No. 7,727,950, hereby incorporated by reference.

[1248] The level of mTOR inhibition can also be evaluated by a change in the ration of PD1 negative to PD1 positive T cells. T cells from peripheral blood can be identified as PD1 negative or positive by art-known methods.

Low-Dose mTOR Inhibitors

[1249] Methods described herein use low, immune enhancing, dose mTOR inhibitors, doses of mTOR inhibitors, e.g., allosteric mTOR inhibitors, including rapalogs such as RAD001. In contrast, levels of inhibitor that fully or near fully inhibit the mTOR pathway are immunosuppressive and are used, e.g., to prevent organ transplant rejection. In addition, high doses of rapalogs that fully inhibit mTOR also inhibit tumor cell growth and are used to treat a variety of cancers (See, e.g., Antineoplastic effects of mammalian target of rapamycine inhibitors. Salvadori M. World J Transplant. 2012 Oct. 24; 2(5):74-83; Current and Future Treatment Strategies for Patients with Advanced Hepatocellular Carcinoma: Role of mTOR Inhibition. Finn RS. Liver Cancer. 2012 November; 1(3-4):247-256; Emerging Signaling Pathways in Hepatocellular Carcinoma. Moeini A, Comelli H, Villanueva A. Liver Cancer. 2012 September; 1(2):83-93; Targeted cancer therapy—Are the days of systemic chemotherapy numbered? Joo W D, Visintin I, Mor G. Maturitas. 2013 Sep. 20.; Role of natural and adaptive immunity in renal cell carcinoma response to VEGFR-TKIs and mTOR inhibitor. Santoni M, Berardi R, Amantini C, Burattini L, Santini D, Santoni G, Cascinu S. Int J Cancer. 2013 Oct. 2).

[1250] The present invention is based, at least in part, on the surprising finding that doses of mTOR inhibitors well below those used in current clinical settings had a superior effect in increasing an immune response in a subject and increasing the ratio of PD-1 negative T cells/PD-1 positive T cells. It was surprising that low doses of mTOR inhibitors, producing only partial inhibition of mTOR activity, were able to effectively improve immune responses in human subjects and increase the ratio of PD-1 negative T cells/PD-1 positive T cells.

[1251] Alternatively, or in addition, without wishing to be bound by any theory, it is believed that low, a low, immune enhancing, dose of an mTOR inhibitor can increase naive T cell numbers, e.g., at least transiently, e.g., as compared to a non-treated subject. Alternatively or additionally, again while not wishing to be bound by theory, it is believed that treatment with an mTOR inhibitor after a sufficient amount of time or sufficient dosing results in one or more of the following:
[1252] an increase in the expression of one or more of the following markers: CD62L^{high} CD127^{high} CD27⁺, and BCL2, e.g., on memory T cells, e.g., memory T cell precursors;
[1253] a decrease in the expression of KLRG1, e.g., on memory T cells, e.g., memory T cell precursors; and
[1254] an increase in the number of memory T cell precursors, e.g., cells with any one or combination of the following characteristics: increased CD62L^{high} increased CD127^{high}, increased CD27⁺, decreased KLRG1, and increased BCL2;
[1255] and wherein any of the changes described above occurs, e.g., at least transiently, e.g., as compared to a non-treated subject (Araki, K et al. (2009) Nature 460:108-112). Memory T cell precursors are memory T cells that are early in the differentiation program. For example, memory T cells have one or more of the following characteristics: increased CD62L^{high} increased CD127^{high}, increased CD27⁺, decreased KLRG1, and/or increased BCL2.

[1256] In an embodiment, the invention relates to a composition, or dosage form, of an mTOR inhibitor, e.g., an allosteric mTOR inhibitor, e.g., a rapalog, rapamycin, or RAD001, or a catalytic mTOR inhibitor, which, when administered on a selected dosing regimen, e.g., once daily or once weekly, is associated with: a level of mTOR inhibition that is not associated with complete, or significant immune suppression, but is associated with enhancement of the immune response.

[1257] An mTOR inhibitor, e.g., an allosteric mTOR inhibitor, e.g., a rapalog, rapamycin, or RAD001, or a catalytic mTOR inhibitor, can be provided in a sustained release formulation. Any of the compositions or unit dosage forms described herein can be provided in a sustained release formulation. In some embodiments, a sustained release formulation will have lower bioavailability than an immediate release formulation. E.g., in embodiments, to attain a similar therapeutic effect of an immediate release formulation a sustained release formulation will have from about 2 to about 5, about 2.5 to about 3.5, or about 3 times the amount of inhibitor provided in the immediate release formulation.

[1258] In an embodiment, immediate release forms, e.g., of RAD001, typically used for one administration per week, having 0.1 to 20, 0.5 to 10, 2.5 to 7.5, 3 to 6, or about 5, mgs per unit dosage form, are provided. For once per week administrations, these immediate release formulations correspond to sustained release forms, having, respectively, 0.3 to 60, 1.5 to 30, 7.5 to 22.5, 9 to 18, or about 15 mgs of an mTOR inhibitor, e.g., an allosteric mTOR inhibitor, e.g., rapamycin or RAD001. In embodiments both forms are administered on a once/week basis.

[1259] In an embodiment, immediate release forms, e.g., of RAD001, typically used for one administration per day, having 0.005 to 1.5, 0.01 to 1.5, 0.1 to 1.5, 0.2 to 1.5, 0.3 to 1.5, 0.4 to 1.5, 0.5 to 1.5, 0.6 to 1.5, 0.7 to 1.5, 0.8 to 1.5, 1.0 to 1.5, 0.3 to 0.6, or about 0.5 mgs per unit dosage form, are provided. For once per day administrations, these immediate release forms correspond to sustained release forms, having, respectively, 0.015 to 4.5, 0.03 to 4.5, 0.3 to 4.5, 0.6 to 4.5, 0.9 to 4.5, 1.2 to 4.5, 1.5 to 4.5, 1.8 to 4.5, 2.1 to 4.5, 2.4 to 4.5, 3.0 to 4.5, 0.9 to 1.8, or about 1.5 mgs of an mTOR inhibitor, e.g., an allosteric mTOR inhibitor, e.g., rapamycin or RAD001. For once per week administrations, these immediate release forms correspond to sustained release forms, having, respectively, 0.1 to 30, 0.2 to 30, 2 to 30, 4 to 30, 6 to 30, 8 to 30, 10 to 30, 1.2 to 30, 14 to 30, 16 to 30, 20 to 30, 6 to 12, or about 10 mgs of an mTOR inhibitor, e.g., an allosteric mTOR inhibitor, e.g., rapamycin or RAD001.

[1260] In an embodiment, immediate release forms, e.g., of RAD001, typically used for one administration per day, having 0.01 to 1.0 mgs per unit dosage form, are provided. For once per day administrations, these immediate release forms correspond to sustained release forms, having, respectively, 0.03 to 3 mgs of an mTOR inhibitor, e.g., an allosteric mTOR inhibitor, e.g., rapamycin or RAD001. For once per week administrations, these immediate release forms correspond to sustained release forms, having, respectively, 0.2 to 20 mgs of an mTOR inhibitor, e.g., an allosteric mTOR inhibitor, e.g., rapamycin or RAD001.

[1261] In an embodiment, immediate release forms, e.g., of RAD001, typically used for one administration per week, having 0.5 to 5.0 mgs per unit dosage form, are provided. For once per week administrations, these immediate release forms correspond to sustained release forms, having, respectively, 1.5 to 15 mgs of an mTOR inhibitor, e.g., an allosteric mTOR inhibitor, e.g., rapamycin or RAD001.

[1262] As described above, one target of the mTOR pathway is the P70 S6 kinase. Thus, doses of mTOR inhibitors which are useful in the methods and compositions described herein are those which are sufficient to achieve no greater than 80% inhibition of P70 S6 kinase activity relative to the activity of the P70 S6 kinase in the absence of an mTOR inhibitor, e.g., as measured by an assay described herein, e.g., the Boulay assay. In a further aspect, the invention provides an amount of an mTOR inhibitor sufficient to achieve no greater than 38% inhibition of P70 S6 kinase activity relative to P70 S6 kinase activity in the absence of an mTOR inhibitor.

[1263] In one aspect the dose of mTOR inhibitor useful in the methods and compositions of the invention is sufficient to achieve, e.g., when administered to a human subject, 90+/−5% (i.e., 85-95%), 89+/−5%, 88+/−5%, 87+/−5%, 86+/−5%, 85+/−5%, 84+/−5%, 83+/−5%, 82+/−5%, 81+/−5%, 80+/−5%, 79+/−5%, 78+/−5%, 77+/−5%, 76+/−5%, 75+/−5%, 74+/−5%, 73+/−5%, 72+/−5%, 71+/−5%, 70+/−5%, 69+/−5%, 68+/−5%, 67+/−5%, 66+/−5%, 65 +/−5%, 64+/−5%, 63+/−5%, 62+/−5%, 61+/−5%, 60+/−5%, 59+/−5%, 58+/−5%, 57+/−5%, 56+/−5%, 55+/−5%, 54+/−5%, 54+/−5%, 53+/−5%, 52+/−5%, 51+/−5%, 50+/−5%, 49+/−5%, 48+/−5%, 47+/−5%, 46+/−5%, 45+/−5%, 44+/−5%, 43+/−5%, 42+/−5%, 41+/−5%, 40 +/−5%, 39+/−5%, 38+/−5%, 37+/−5%, 36+/−5%, 35+/−5%, 34+/−5%, 33+/−5%, 32+/−5%, 31+/−5%, 30+/−5%, 29+/−5%, 28+/−5%, 27+/−5%, 26+/−5%, 25+/−5%, 24+/−5%, 23+/−5%, 22+/−5%, 21+/−5%, 20+/−5%, 19+/−5%, 18+/−5%, 17+/−5%, 16+/−5%, 15+/−5%, 14 +/−5%, 13+/−5%, 12+/−5%, 11+/−5%, or 10+/−5%, inhibition of P70 S6 kinase activity, e.g., as measured by an assay described herein, e.g., the Boulay assay.

[1264] P70 S6 kinase activity in a subject may be measured using methods known in the art, such as, for example, according to the methods described in U.S. Pat. No. 7,727,950, by immunoblot analysis of phosphoP70 S6K levels and/or phosphoP70 S6 levels or by in vitro kinase activity assays.

[1265] As used herein, the term “about” in reference to a dose of mTOR inhibitor refers to up to a +/−10% variability in the amount of mTOR inhibitor, but can include no variability around the stated dose.

[1266] In some embodiments, the invention provides methods comprising administering to a subject an mTOR inhibitor, e.g., an allosteric inhibitor, e.g., RAD001, at a dosage within a target trough level. In some embodiments, the trough level is significantly lower than trough levels associated with dosing regimens used in organ transplant and cancer patients. In an embodiment mTOR inhibitor, e.g., RAD001, or rapamycin, is administered to result in a trough level that is less than ½, ¼, 1/10, or 1/20 of the trough level that results in immunosuppression or an anticancer effect. In an embodiment mTOR inhibitor, e.g., RAD001, or rapamycin, is administered to result in a trough level that is less than ½, ¼, 1/10, or 1/20 of the trough level provided on the FDA approved packaging insert for use in immunosuppression or an anticancer indications.

[1267] In an embodiment a method disclosed herein comprises administering to a subject an mTOR inhibitor, e.g., an allosteric inhibitor, e.g., RAD001, at a dosage that provides a target trough level of 0.1 to 10 ng/ml, 0.1 to 5 ng/ml, 0.1 to 3 ng/ml, 0.1 to 2 ng/ml, or 0.1 to 1 ng/ml.

[1268] In an embodiment a method disclosed herein comprises administering to a subject an mTOR inhibitor, e.g., an allosteric inhibitor, e.g., RAD001, at a dosage that provides a target trough level of 0.2 to 10 ng/ml, 0.2 to 5 ng/ml, 0.2 to 3 ng/ml, 0.2 to 2 ng/ml, or 0.2 to 1 ng/ml.

[1269] In an embodiment a method disclosed herein comprises administering to a subject an mTOR inhibitor, e.g. an, allosteric inhibitor, e.g., RAD001, at a dosage that provides a target trough level of 0.3 to 10 ng/ml, 0.3 to 5 ng/ml, 0.3 to 3 ng/ml, 0.3 to 2 ng/ml, or 0.3 to 1 ng/ml.

[1270] In an embodiment a method disclosed herein comprises administering to a subject an mTOR inhibitor, e.g., an allosteric inhibitor, e.g., RAD001, at a dosage that provides a target trough level of 0.4 to 10 ng/ml, 0.4 to 5 ng/ml, 0.4 to 3 ng/ml, 0.4 to 2 ng/ml, or 0.4 to 1 ng/ml.

[1271] In an embodiment a method disclosed herein comprises administering to a subject an mTOR inhibitor, e.g., an allosteric inhibitor, e.g., RAD001, at a dosage that provides a target trough level of 0.5 to 10 ng/ml, 0.5 to 5 ng/ml, 0.5 to 3 ng/ml, 0.5 to 2 ng/ml, or 0.5 to 1 ng/ml.

[1272] In an embodiment a method disclosed herein comprises administering to a subject an mTOR inhibitor, e.g., an allosteric inhibitor, e.g., RAD001, at a dosage that provides a target trough level of 1 to 10 ng/ml, 1 to 5 ng/ml, 1 to 3 ng/ml, or 1 to 2 ng/ml.

[1273] As used herein, the term “trough level” refers to the concentration of a drug in plasma just before the next dose, or the minimum drug concentration between two doses.

[1274] In some embodiments, a target trough level of RAD001 is in a range of between about 0.1 and 4.9 ng/ml. In an embodiment, the target trough level is below 3 ng/ml, e.g., is between 0.3 or less and 3 ng/ml. In an embodiment, the target trough level is below 3 ng/ml, e.g., is between 0.3 or less and 1 ng/ml.

[1275] In a further aspect, the invention can utilize an mTOR inhibitor other than RAD001 in an amount that is associated with a target trough level that is bioequivalent to the specified target trough level for RAD001. In an embodiment, the target trough level for an mTOR inhibitor other than RAD001, is a level that gives the same level of mTOR inhibition (e.g., as measured by a method described herein, e.g., the inhibition of P70 S6) as does a trough level of RAD001 described herein.

### Pharmaceutical Compositions: MTOR Inhibitors

[1276] In one aspect, the present invention relates to pharmaceutical compositions comprising an mTOR inhibitor, e.g., an mTOR inhibitor as described herein, formulated for use in combination with CAR cells described herein.

[1277] In some embodiments, the mTOR inhibitor is formulated for administration in combination with an additional, e.g., as described herein.

[1278] In general, compounds of the invention will be administered in therapeutically effective amounts as described above via any of the usual and acceptable modes known in the art, either singly or in combination with one or more therapeutic agents.

[1279] The pharmaceutical formulations may be prepared using conventional dissolution and mixing procedures. For example, the bulk drug substance (e.g., an mTOR inhibitor or stabilized form of the compound (e.g., complex with a cyclodextrin derivative or other known complexation agent) is dissolved in a suitable solvent in the presence of one or more of the excipients described herein. The mTOR inhibitor is typically formulated into pharmaceutical dosage forms to provide an easily controllable dosage of the drug and to give the patient an elegant and easily handleable product.

[1280] Compounds of the invention can be administered as pharmaceutical compositions by any conventional route, in particular enterally, e.g., orally, e.g., in the form of tablets or capsules, or parenterally, e.g., in the form of injectable solutions or suspensions, topically, e.g., in the form of lotions, gels, ointments or creams, or in a nasal or suppository form. Where an mTOR inhibitor is administered in combination with (either simultaneously with or separately from) another agent as described herein, in one aspect, both components can be administered by the same route (e.g., parenterally). Alternatively, another agent may be administered by a different route relative to the mTOR inhibitor. For example, an mTOR inhibitor may be administered orally and the other agent may be administered parenterally.

### Sustained Release

[1281] mTOR inhibitors, e.g., allosteric mTOR inhibitors or catalytic mTOR inhibitors, disclosed herein can be provided as pharmaceutical formulations in form of oral solid dosage forms comprising an mTOR inhibitor disclosed herein, e.g., rapamycin or RAD001, which satisfy product stability requirements and/or have favorable pharmacokinetic properties over the immediate release (IR) tablets, such as reduced average plasma peak concentrations, reduced inter- and intra-patient variability in the extent of drug absorption and in the plasma peak concentration, reduced Cₘₐₓ/Cₘᵢₙ ratio and/or reduced food effects. Provided pharmaceutical formulations may allow for more precise dose adjustment and/or reduce frequency of adverse events thus providing safer treatments for patients with an mTOR inhibitor disclosed herein, e.g., rapamycin or RAD001.

[1282] In some embodiments, the present disclosure provides stable extended release formulations of an mTOR inhibitor disclosed herein, e.g., rapamycin or RAD001, which are multi-particulate systems and may have functional layers and coatings.

[1283] The term “extended release, multi-particulate formulation as used herein refers to a formulation which enables release of an mTOR inhibitor disclosed herein, e.g., rapamycin or RAD001, over an extended period of time e.g. over at least 1, 2, 3, 4, 5 or 6 hours. The extended release formulation may contain matrices and coatings made of special excipients, e.g., as described herein, which are formulated in a manner as to make the active ingredient available over an extended period of time following ingestion.

[1284] The term “extended release” can be interchangeably used with the terms “sustained release” (SR) or “prolonged release”. The term “extended release” relates to a pharmaceutical formulation that does not release active drug substance immediately after oral dosing but over an extended in accordance with the definition in the pharmacopoeias Ph. Eur. (7^{th} edition) monograph for tablets and capsules and USP general chapter <1151> for pharmaceutical dosage forms. The term “Immediate Release” (IR) as used herein refers to a pharmaceutical formulation which releases 85% of the active drug substance within less than 60 minutes in accordance with the definition of “Guidance for Industry: “Dissolution Testing of Immediate Release Solid Oral Dosage Forms” (FDA CDER, 1997). In some embodiments, the term “immediate release” means release of everolismus from tablets within the time of 30 minutes, e.g., as measured in the dissolution assay described herein.

[1285] Stable extended release formulations of an mTOR inhibitor disclosed herein, e.g., rapamycin or RAD001, can be characterized by an in-vitro release profile using assays known in the art, such as a dissolution assay as described herein: a dissolution vessel filled with 900 mL phosphate buffer pH 6.8 containing sodium dodecyl sulfate 0.2% at 37° C. and the dissolution is performed using a paddle method at 75 rpm according to USP by according to USP testing monograph 711, and Ph. Eur. testing monograph 2.9.3. respectively.

[1286] In some embodiments, stable extended release formulations of an mTOR inhibitor disclosed herein, e.g., rapamycin or RAD001, release the mTOR inhibitor in the in-vitro release assay according to following release specifications:

$$0.5 h : \text{<} 45 \% , or < 40 , e . g . , < 30 \%$$

$$1 h : 20 - 80 \% , e . g . , 30 - 60 \%$$

$$2 h : > 50 \% , or > 70 \% , e . g . , > 75 \%$$

$$3 h : > 60 \% , or > 65 \% , e . g . , > 85 \% , e . g . , > 90 \% .$$

[1287] In some embodiments, stable extended release formulations of an mTOR inhibitor disclosed herein, e.g., rapamycin or RAD001, release 50% of the mTOR inhibitor not earlier than 45, 60, 75, 90, 105 min or 120 min in the in-vitro dissolution assay.

### Biopolymer Delivery Methods

[1288] In some embodiments, one or more CAR-expressing cells as disclosed herein can be administered or delivered to the subject via a biopolymer scaffold, e.g., a biopolymer implant. Biopolymer scaffolds can support or enhance the delivery, expansion, and/or dispersion of the CAR-expressing cells described herein. A biopolymer scaffold comprises a biocompatible (e.g., does not substantially induce an inflammatory or immune response) and/or a biodegradable polymer that can be naturally occurring or synthetic.

[1289] Examples of suitable biopolymers include, but are not limited to, agar, agarose, alginate, alginate/calcium phosphate cement (CPC), beta-galactosidase (P-GAL), (1,2,3,4,6-pentaacetyl a-D-galactose), cellulose, chitin, chitosan, collagen, elastin, gelatin, hyaluronic acid collagen, hydroxyapatite, poly(3-hydroxybutyrate-co-3-hydroxy-hexanoate) (PHBHHx), poly(lactide), poly(caprolactone) (PCL), poly(lactide-co-glycolide) (PLG), polyethylene oxide (PEO), poly(lactic-co-glycolic acid) (PLGA), polypropylene oxide (PPO), polyvinyl alcohol) (PVA), silk, soy protein, and soy protein isolate, alone or in combination with any other polymer composition, in any concentration and in any ratio. The biopolymer can be augmented or modified with adhesion- or migration-promoting molecules, e.g., collagen-mimetic peptides that bind to the collagen receptor of lymphocytes, and/or stimulatory molecules to enhance the delivery, expansion, or function, e.g., anti-cancer activity, of the cells to be delivered. The biopolymer scaffold can be an injectable, e.g., a gel or a semi-solid, or a solid composition.

[1290] In some embodiments, CAR-expressing cells described herein are seeded onto the biopolymer scaffold prior to delivery to the subject. In embodiments, the biopolymer scaffold further comprises one or more additional therapeutic agents described herein (e.g., another CAR-expressing cell, an antibody, or a small molecule) or agents that enhance the activity of a CAR-expressing cell, e.g., incorporated or conjugated to the biopolymers of the scaffold. In embodiments, the biopolymer scaffold is injected, e.g., intratumorally, or surgically implanted at the tumor or within a proximity of the tumor sufficient to mediate an anti-tumor effect. Additional examples of biopolymer compositions and methods for their delivery are described in Stephan et al., Nature Biotechnology, 2015, 33:97-101; and WO2014/110591.

### Pharmaceutical Compositions and Treatments

[1291] Pharmaceutical compositions of the present invention may comprise a CAR-expressing cell, e.g., a plurality of CAR-expressing cells, as described herein, in combination with one or more pharmaceutically or physiologically acceptable carriers, diluents or excipients. Such compositions may comprise buffers such as neutral buffered saline, phosphate buffered saline and the like; carbohydrates such as glucose, mannose, sucrose or dextrans, mannitol; proteins; polypeptides or amino acids such as glycine; antioxidants; chelating agents such as EDTA or glutathione; adjuvants (e.g., aluminum hydroxide); and preservatives. Compositions of the present invention are in one aspect formulated for intravenous administration.

[1292] Pharmaceutical compositions of the present invention may be administered in a manner appropriate to the disease to be treated (or prevented). The quantity and frequency of administration will be determined by such factors as the condition of the patient, and the type and severity of the patient's disease, although appropriate dosages may be determined by clinical trials.

[1293] In one embodiment, the pharmaceutical composition is substantially free of, e.g., there are no detectable levels of a contaminant, e.g., selected from the group consisting of endotoxin, mycoplasma, replication competent lentivirus (RCL), p24, VSV-G nucleic acid, HIV gag, residual anti-CD3/anti-CD28 coated beads, mouse antibodies, pooled human serum, bovine serum albumin, bovine serum, culture media components, vector packaging cell or plasmid components, a bacterium and a fungus. In one embodiment, the bacterium is at least one selected from the group consisting of Alcaligenes faecalis, Candida albicans, Escherichia coli, Haemophilus influenza, Neisseria meningitides, Pseudomonas aeruginosa, Staphylococcus aureus, Streptococcus pneumonia, and Streptococcus pyogenes group A.

[1294] When “an immunologically effective amount,” “an anti-tumor effective amount,” “a tumor-inhibiting effective amount,” or “therapeutic amount” is indicated, the precise amount of the compositions of the present invention to be administered can be determined by a physician with consideration of individual differences in age, weight, tumor size, extent of infection or metastasis, and condition of the patient (subject). It can generally be stated that a pharmaceutical composition comprising the immune effector cells (e.g., T cells, NK cells) described herein may be administered at a dosage of 10⁴ to 10⁹ cells/kg body weight, in some instances 10⁵ to 10⁶ cells/kg body weight, including all integer values within those ranges. T cell compositions may also be administered multiple times at these dosages. The cells can be administered by using infusion techniques that are commonly known in immunotherapy (see, e.g., Rosenberg et al., New Eng. J. of Med. 319:1676, 1988).

[1295] In certain aspects, it may be desired to administer activated immune effector cells (e.g., T cells, NK cells) to a subject and then subsequently redraw blood (or have an apheresis performed), activate immune effector cells (e.g., T cells, NK cells) therefrom according to the present invention, and reinfuse the patient with these activated and expanded immune effector cells (e.g., T cells, NK cells). This process can be carried out multiple times every few weeks. In certain aspects, immune effector cells (e.g., T cells, NK cells) can be activated from blood draws of from 10 cc to 400 cc. In certain aspects, immune effector cells (e.g., T cells, NK cells) are activated from blood draws of 20 cc, 30 cc, 40 cc, 50 cc, 60 cc, 70 cc, 80 cc, 90 cc, or 100 cc.

[1296] The administration of the subject compositions may be carried out in any convenient manner, including by aerosol inhalation, injection, ingestion, transfusion, implantation or transplantation. The compositions described herein may be administered to a patient trans arterially, subcutaneously, intradermally, intratumorally, intranodally, intramedullary, intramuscularly, by intravenous (i.v.) injection, or intraperitoneally. In one aspect, the T cell compositions of the present invention are administered to a patient by intradermal or subcutaneous injection. In one aspect, the T cell compositions of the present invention are administered by i.v. injection. The compositions of immune effector cells (e.g., T cells, NK cells) may be injected directly into a tumor, lymph node, or site of infection.

[1297] In a particular exemplary aspect, subjects may undergo leukapheresis, wherein leukocytes are collected, enriched, or depleted ex vivo to select and/or isolate the cells of interest, e.g., T cells. These T cell isolates may be expanded by methods known in the art and treated such that one or more CAR constructs of the invention may be introduced, thereby creating a CAR T cell of the invention. Subjects in need thereof may subsequently undergo standard treatment with high dose chemotherapy followed by peripheral blood stem cell transplantation. In certain aspects, following or concurrent with the transplant, subjects receive an infusion of the expanded CAR T cells of the present invention. In an additional aspect, expanded cells are administered before or following surgery.

[1298] The dosage of the above treatments to be administered to a patient will vary with the precise nature of the condition being treated and the recipient of the treatment. The scaling of dosages for human administration can be performed according to art-accepted practices. The dose for CAMPATH, for example, will generally be in the range 1 to about 100 mg for an adult patient, usually administered daily for a period between 1 and 30 days. The preferred daily dose is 1 to 10 mg per day although in some instances larger doses of up to 40 mg per day may be used (described in U.S. Pat. No. 6,120,766).

[1299] In one embodiment, the CAR is introduced into immune effector cells (e.g., T cells, NK cells), e.g., using in vitro transcription, and the subject (e.g., human) receives an initial administration of CAR immune effector cells (e.g., T cells, NK cells) of the invention, and one or more subsequent administrations of the CAR immune effector cells (e.g., T cells, NK cells) of the invention, wherein the one or more subsequent administrations are administered less than 15 days, e.g., 14, 13, 12, 11, 10, 9, 8, 7, 6, 5, 4, 3, or 2 days after the previous administration. In one embodiment, more than one administration of the CAR immune effector cells (e.g., T cells, NK cells) of the invention are administered to the subject (e.g., human) per week, e.g., 2, 3, or 4 administrations of the CAR immune effector cells (e.g., T cells, NK cells) of the invention are administered per week. In one embodiment, the subject (e.g., human subject) receives more than one administration of the CAR immune effector cells (e.g., T cells, NK cells) per week (e.g., 2, 3 or 4 administrations per week) (also referred to herein as a cycle), followed by a week of no CAR immune effector cells (e.g., T cells, NK cells) administrations, and then one or more additional administration of the CAR immune effector cells (e.g., T cells, NK cells) (e.g., more than one administration of the CAR immune effector cells (e.g., T cells, NK cells) per week) is administered to the subject. In another embodiment, the subject (e.g., human subject) receives more than one cycle of CAR immune effector cells (e.g., T cells, NK cells), and the time between each cycle is less than 10, 9, 8, 7, 6, 5, 4, or 3 days. In one embodiment, the CAR immune effector cells (e.g., T cells, NK cells) are administered every other day for 3 administrations per week. In one embodiment, the CAR immune effector cells (e.g., T cells, NK cells) of the invention are administered for at least two, three, four, five, six, seven, eight or more weeks.

[1300] In one aspect, CAR-expressing cells of the present inventions are generated using lentiviral viral vectors, such as lentivirus. Cells, e.g., CARTs, generated that way will have stable CAR expression.

[1301] In one aspect, CAR-expressing cells, e.g., CARTs, are generated using a viral vector such as a gammaretroviral vector, e.g., a gammaretroviral vector described herein. CARTs generated using these vectors can have stable CAR expression.

[1302] In one aspect, CARTs transiently express CAR vectors for 4, 5, 6, 7, 8, 9, 10, 11, 12, 13, 14, 15 days after transduction. Transient expression of CARs can be effected by RNA CAR vector delivery. In one aspect, the CAR RNA is transduced into the T cell by electroporation.

[1303] A potential issue that can arise in patients being treated using transiently expressing CAR immune effector cells (e.g., T cells, NK cells) (particularly with murine scFv bearing CARTs) is anaphylaxis after multiple treatments.

[1304] Without being bound by this theory, it is believed that such an anaphylactic response might be caused by a patient developing humoral anti-CAR response, i.e., anti-CAR antibodies having an anti-IgE isotype. It is thought that a patient's antibody producing cells undergo a class switch from IgG isotype (that does not cause anaphylaxis) to IgE isotype when there is a ten to fourteen day break in exposure to antigen.

[1305] If a patient is at high risk of generating an anti-CAR antibody response during the course of transient CAR therapy (such as those generated by RNA transductions), CART infusion breaks should not last more than ten to fourteen days.

### EXAMPLES

[1306] The invention is further described in detail by reference to the following experimental examples. These examples are provided for purposes of illustration only, and are not intended to be limiting unless otherwise specified. Thus, the invention should in no way be construed as being limited to the following examples, but rather, should be construed to encompass any and all variations which become evident as a result of the teaching provided herein.

### Example 1: SHP1 Inhibition by SSG

[1307] CAR T cells typically undergo hypofunction after injection into tumor-bearing immunodeficient mice that is attributable, in part, to SHP1 activity. The inability to lyse tumors and secrete cytokines in CAR TILs isolated from NSG flank tumors was reversible by exposing them ex vivo to the SHP1 inhibitor, SSG, during the overnight coculture with target tumor cells (FIG. 3). Although this observation supports SHP1 playing a role in CAR TIL hypofunction, the potential of translation to the clinic has been limited due to SSG's well-described side effects of phlebotoxicity and pancreatitis.

### Example 2: Full-length Dominant Negative SHP1

[1308] Because of the side effect issues cited in Example 1, human T cells were genetically modified with full-length dominant-negative versions of SHP1 based on point mutations (amino-acid substitutions) previously published (Paling N R, Welham M J. Biochem J 2002 Dec. 15; 368 (Pt 3):885-94). Two versions were tested in comparison to wild-type SHP1 (WT): 1) R459M and 2) C453S. Plasmids encoding for WT or mutated SHP1 were first transfected into human tumor cells and SHP1 activity was measured using a kit whose readout is the fluorescence emitted by the presence of free phosphates. Compared to WT plasmid, the two mutant plasmids led to a significant decrease in SHP1 activity (FIG. 4). The mutant constructs were then subcloned into a T7 promoter-driven mRNA transcription plasmid and mRNA encoding for WT and mutated SHP1's were made. Bead-activated T cells transduced with mesothelin CAR lentivirus underwent electroporation with the mRNAs. 24 hours later, a co-culture killing assay was done to test the effects of the SHP1 mutants on CAR directed killing. There was a statistically significant increase in 18 hr lysis of mesothelin-expressing tumor targets conferred by the C453S mutation (FIG. 5).

[1309] However, achieving reasonable co-expression and function of the SHP1 mutant with CAR was technically very challenging due to three reasons:
[1310] 1) For permanent transfection, mutated SHP1 is difficult to co-express at high frequency with CAR due to the two constructs being at the maximum packaging limit of lentivirus.
[1311] 2) The modest expression levels of mutated SHP1 are incapable of successfully interfering with wild-type/native SHP1 which is expressed in abundant amounts in effector T cells.
[1312] 3) mRNA electroporation can be toxic to T cells and only allows for a limited time of expression (around 6 days).

### Example 3: siRNA/shRNA Knockdown of SHP1

[1313] Knockdown of SHP1 via siRNA/shRNA was also evaluated. However, multiple attempts at modifying T cells with siRNA via electroporation or shRNA via viral transduction were hindered by toxicity as manifested by suppressed proliferation after anti-CD3/28 bead activation (FIG. 6).

### Example 4: SH2-N as Inhibitor of SHP1

[1314] In light of these hurdles, an alternative way to interfere with SHP1 activity was investigated, with a focus on meeting two criteria:
[1315] 1) Avoid having to use siRNA/shRNA.
[1316] 2) Find an inhibitor with a short gene length that in combination with the CAR gene would be well below the total gene length limitation for lentivirus packaging.

[1317] Detailed molecular information about how SHP1 works was utilized. The catalytic site of SHP1 is normally occupied by the N-terminus of its SH2 domain (SH2-N). This self binding keeps SHP1 in its non-catalytic conformation (Poole A W, Jones M L. A SHPing tale: perspectives on the regulation of SHP-1 and SHP-2 tyrosine phosphatases by the C-terminal tail. Cell Signal 2005 November; 17(11):1323-32). SH2-N releases from the catalytic domain upon recognition of phosphorylated tyrosine motifs (pTyr) on immunoreceptor tyrosine-based inhibition motifs (ITIMs), which are located on the cytoplasmic tails of IRs like PD1 (Yaffe M B. Nat Rev Mol Cell Biol 2002 March; 3(3):177-86; Hampel K, Kaufhold I, Zacharias M, Bohmer F D, Imhof D. ChemMedChem 2006 August; 1(8):869-77) (FIG. 7). Once the SH2-domain binds to the ITIM, the catalytic activity of SHP1 is “released”.

[1318] Expressing the endogenous SH2-N domain of SHP1 along with the CAR was considered, with the idea that it would occupy the catalytic site and reduce SHP1 function. However, given that this small protein would also bind to phosphorylated ITIMs and be pulled away from the SHP1 catalytic site, it was hypothesized that mutating the SH2-N domain residues that were involved in ITIM binding would make a protein less likely to be dislodged from the SHP1 catalytic site and thus be a better inhibitor.

[1319] Based on this hypothesis, gene sequences encoding for SH2-N with and without an amino-acid mutation (R30K) in the pTyr recognition site were designed. The sequence for SH2-N was based off a previously published sequence (Teichmann, #999; Poole, 2005. #596). The mutation was based off of previously published description of the sequence within SH2-N which recognizes the phosphorylated tyrosine motif (Thaventhiran T, Sethu S, Yeang H X, Laith A H, Hamdam J, Sathish J G. J Clin Cell Immunol 2012; S12:1-12. #612; Hampel, 2006. #576). The specific mutation was designed to disrupt the ability of SH2-N occupying the enzymatic cleft of SHP1 to recognize phosphorylated tyrosine motifs releasing it from the cleft. This minigene was incorporated into a lentiviral expression plasmid encoding for CAR using a bicistronic 2A platform. Experiments were performed to gather in-vitro and in-vivo data describing the SH2-N-R30K's ability to augment CAR T cell function.

### Example 5: SH2-N and CAR Constructs

[1320] The SH2-N and the SH2-N—R30K constructs were designed and ordered from IDT (Coralville, Iowa) (FIG. 8).

[1321] These sequences were then subcloned into a lentiviral expression plasmid encoding for the mesothelin directed CAR, SS1BBz, utilizing standard molecular biology techniques (Carpenito C, Milone M C, Hassan R, Simonet J C, Lakhal M, Suhoski M M, et al. Proc Natl Acad Sci USA 2009 Mar. 3; 106(9):3360-5) (FIG. 9). Unlike previous larger DN constructs (see Example 2), high titer lentivirus was easily packaged using 293T cells according to standard protocols utilizing third generation lentivirus packaging plasmids.

### Example 6: Cytokine Production of Transduced T Cells

[1322] CD8 and CD4 human T cells acquired from healthy donors from Penn's Human Immunology Core were subjected to anti-CD3/CD28 bead activation. They were then transduced with lentivirus encoding for CAR, CAR/SH2-N, and CAR/SH2-N—R30K. Flow-cytometry analysis confirmed a transduction efficiency of approximately 50% across all three T cell types. After “resting down”, the T cells were then re-stimulated with plate-bound anti-CD3 antibody in the presences of Golgi-stop and Golgi-plug (BD, San Jose CA) and were subjected to intracellular cytokine detection via flow cytometry. The hypothesis was that CAR T cells with inhibited SHP1 would activate more vigorously with TCR stimulation.

[1323] Analyzing the transduced CD8+ T cells, the SH2-N and SH2-N—R30K expressing T cells had the greatest percentage of cytokine producing cells, with SH2-N—R30K T cells having the greatest % of IL2 producers (FIG. 10). This was especially true on those transduced CD8+ T cells that had PD1 expression. Thus, for example, after CD3 stimulation, the percent of CD8 cells making IL2 was 4.3% in non-transduced T cells, 3.8% in T cells transduced with CARs, 7.2% in T cells transduced with the CAR/SH2-N construct, but 94.4% in the CAR/SH2-N—R30K construct.

### Example 7: In Vitro Tumor Cell Lysis Assay

[1324] Next, to look at antigen-specific activity, the in-vitro killing ability of T cells prepared as described in Example 6 was tested. The different T cells were co-cultured with mesothelin-expressing tumor target cells (a human mesothelioma cell line, EMMESO, with constitutive expression of high levels of mesothelin and transduced to stably express firefly luciferase for purposes of measuring lytic activity via luminescence measurements) at different E:T ratios. This was also done with an EMMESO cell line transduced to stably express high levels of PDL1 (EMMESO-PDL1). CAR, CAR/SH2-N, and CAR/SH2-N—R30K T cells demonstrated very similar killing ability at four different E:T ratios over 18 hr of co-culture with EMMESO (FIG. 11, top). CAR T cell lytic activity was much reduced when reacted with high PDL1-expressing EMMESO cells (FIG. 11, bottom). The SH2-N and SH2-N—R30K CAR T cells showed significantly enhanced lytic ability when reacted against the PDL1-high tumor cells. This was especially true for the CAR/SH2-N—R30K T cells which demonstrated greater lytic ability of EMMESO-PDL1 cells than the CAR/SH1-N T cells.

[1325] These data show that overexpression of the SH2-N domain of SHP1 in CAR T cells can augment cytokine secretion and in vitro tumor lytic ability especially in those CAR T cells expressing PD1. The R30K mutation, which prohibited recognition of phosphorylated tyrosines by and release of SH2-N piece, led to greater enhancement of cytokine secretion (e.g. IL2) and antigen-specific tumor lysis.

### Example 8: In Vivo Anti-Tumor Activity

[1326] An in-vivo experiment testing the ability of the SHP1-based constructs to augment CAR T cell anti-tumor activity was also conducted. NOD-scid IL2rγnull (NSG) mice of 6-8 weeks were injected subcutaneously in the flank with 5 million EMMESO-PDL1 tumor cells. After about 2 weeks, the established flank tumors reached a size of approximately 100 mm³. At this point, mice were randomly assigned to receive NTD T cells, NTD T cells +SSG (20 mg/kg every 2 days), CAR T cells, CAR T cells +SSG (20 mg/kg every 2 days), CAR/SH2-N T cells, or CAR/SH2-N—R30K T cells. The mice were injected with one dose of 10 million T cells per mouse via tail-vein. SSG injections were performed intramuscularly in the hind legs.

[1327] Caliper measurements of the flank tumor size revealed the slowing of tumor by the CAR T cells (FIG. 12, dark blue line vs. green line). There was no statistically significant augmentation of CAR T cell anti-tumor function by SSG injection. The SH2-N modification also did not lead to any significant augmentation of CAR T cell anti-tumor function (FIG. 12, light blue and green lines). The growth of the tumors in the CAR and the CAR/SH2-N T cell treated mice were essentially identical. The R30K modification was necessary to induce significant augmentation of CAR T cell anti-tumor activity. The SH2-N-R30K modification led to enhanced T cell control of EMMESO-PDL1 growth by more than 50% (FIG. 12, orange line).

### Example 9: Mechanism Experiments

[1328] To evaluate the possible mechanisms underlying the results of the in-vivo experiment of Example 8, 27 days after T cell injection, the mice were sacrificed. The tumors were harvested and processed into single cell suspensions and subjected to flow cytometric analysis to examine the degree of TIL infiltration and IR expression. Compared to the mice that received CAR, CAR/SSG, and CAR/SH2-N, those mice that received CAR/SH2-N—R30K had significantly more TIL infiltration (37% of the tumor digest vs. 5-12%) (FIG. 13). Additionally, flow cytometry analysis revealed significantly less upregulation of PD1 and other IRs (i.e. Tim3/CEACAM1) on the CD8 population of TILs in the CAR/SH2-N—R30K TILs than the CAR TILs (FIG. 14).

[1329] The TILs were then isolated from the tumor digests using anti-CD45 based magnetic beads. Subsequently, the TILs were cocultured with EMMESO and EMMESO-PDL1 at different E:T ratios to test their ex-vivo anti-tumor activity. Isolated CAR TILs were significantly hypofunctional in their ability to lyse fresh tumor cells when compared to cryopreserved CAR T cells (cryoCAR; uninjected CAR T cells) (FIG. 15; “cryoCAR” vs. “CAR TIL”). However, at multiple E:T ratios, especially at the lower ratios of 2.5:1 and 1.25:1, the CAR/SH2-N—R30K demonstrated significantly greater ex-vivo killing of both EMMESO and EMMESO-PDL1 tumor cells than CAR TILs (FIG. 15; “CAR/SH2-N—R30K TIL” vs. “CAR TIL”).

[1330] These data show that the truncated tail of SHP1 is able to augment the anti-tumor function of adoptively transferred human CAR T cells in animals bearing human solid tumors through multiple mechanisms that include: 1) by increasing the infiltration of CAR T cells into the tumor, 2) by leading to a less hypofunctional phenotype of CAR TIL as measured by expression of PD1, Tim3, and CEACAM1, and 3) by increased preservation of ex vivo tumor-lytic function. The SH2-N construct was unable to enhance in-vivo activity of CAR T cells. While not wishing to be bound by theory, the most likely reason is that although the SH2-N occupies the enzymatic cleft of SHP1, it can easily release upon recognizing phosphorylated tyrosine motifs (like those on PD1), leaving SHP1's immunosuppressive function intact. Thus, the R30K mutation is required in the SH2-N construct to keep it in the enzymatic cleft of SHP1.

[1331] In summary, the expression of the SH2-N—R30K domain in T cells can significantly augment the efficacy of adoptive CAR T cell therapy by increasing their effector function, particularly in the setting where IR checkpoint inhibition from molecules like PD1 is important. Addition of this SHP1 inhibitory protein could be used in T cells derived from blood, cord blood, bone marrow, and iPSC. This technology could be used to enhance T cell therapy in an anti-cancer setting, and also in chronic viral infections. This approach should work with CAR targeted to any antigen. It should also work equally well in any adoptively transferred T cells, for example T cells expressing transgenic TCRs.

### Example 10: Further Embodiments and Considerations

[1332] Experiments are performed to test the anti-tumor activity of human CAR/SH2-N—R30K T cells using other tumor models, particularly tumors that express ligands binding to multiple IRs that are reported to signal through SHP1. In another experiment, a similar dominant-negative gene is introduced to interfere with SHP2 (another phosphatase similar to SHP1) that has also been suggested to be involved in PD1 signaling, but is less well characterized. An experiment is performed that compares unmodified CAR T cells with those transduced with each of SHP1 and SHP2 dominant-negative genes. An experiment is performed to test the effect of the two dominant-negative genes combined.

[1333] T cells expressing the SH2-N—R30K domain can be used to inhibit tumor growth as a monotherapy and/or have additive or synergistic anti-tumor activity given in combination with other tumor-cell directed therapies. Adoptive cell therapies are likely to include the development of CAR T cells and T cells expressing transgenic TCRs.

[1334] Success with CAR therapy has been achieved in hematologic tumors, but there has been less success reported in solid cancers. One reason for this may be the rapid inactivation of CAR function by the triggering of multiple IRs, like PD1. If this is the case, CAR T cells used to treat solid tumors will need to be resistant to multiple IR signaling pathways. The SH2-N—R30K construct, which can easily be inserted into any CAR (or T cells with transgenic TCRs) in a bicistronic fashion, will accomplish this goal. The SH2-N—R30K transgene is useful for the purpose of solid cancer therapies, further improving the efficacy of CAR T cells or transgenic TCR-expressing T cells.

[1335] Published studies have examined murine T cells with a conditional knockout of SHP1 demonstrating the ability to augment tumor control by effector T cells in a murine model of leukemia (Stromnes I M, Fowler C, Casamina C C, Georgopolos C M, McAfee M S, Schmitt T M, et al. J Immunol August 15; 189(4):1812-25). However, the technology of the present invention is different in that it offers two significant advantages—1) it can successfully abrogate SHP1 signaling in human effector T cells, 2) it can successfully augment tumor control using adoptively transferred T cells against solid tumors, which is the significant hurdle for this field of immunotherapy.

[1336] Several approaches are being researched to improve T cell efficacy in solid tumors, for example, a peptide that blocks PGE2 and adenosine inhibition (RIAD protein). It is possible combinations (e.g., of RIAD and SH2-N—R30K) will be needed.

[1337] There is a chemical compound called sodium stibogluconate (SSG) that is also known to interfere with SHP-1 as well as other protein tyrosine phosphatases. It is used to treat leishmaniasis, but has also been shown to partially reverse the dysfunction of PD1+TILs. However, due to SSG's well-known adverse effects of pancreatic and phlebotoxicity, we feel the genetic method of interfering with SHP1 signaling, presented herein, is safer and more specific and would allow patients to avoid multiple injections of SSG.

### Example 11: Exemplary Experiments with SHP Inhibitor Polypeptide

### Background:

[1338] Immunotherapy using chimeric antigen receptor (CAR) T cells has demonstrated profound, durable success in hematologic malignancies. Solid tumors present hurdles to the successful application of CAR T cells. One is the upregulation of inhibitory receptors (IRs), like PD1 and CTLA4, many of which rely on shared signaling molecules to shut off T cell activation. One such molecule is SHP1 (Src homology region 2 dominant-negative SHP1 (dnSHP1) that is able to augment CAR T cell control of PDL1 positive solid tumors.

### Materials and Methods:

[1339] The human mesothelioma cell line, EMP, was transduced to express high levels of mesothelin and PDL1 (EMMESO-PDL1). Activated human T cells from healthy donors were lentivirally transduced to express a mesothelin-directed CAR (mesoCAR) with and without a dnSHP1. MesoCAR and mesoCAR/dnSHP1 T cells were cocultured with tumor cells x 18 hrs and specific lysis was measured. These T cells were also restimulated with plate-bound anti-CD3 overnight and were subjected to intracellular flow cytometry staining (ICS) of cytokines. NSG mice were injected subcutaneously in the flanks with 5×10⁶ EMMESO-PDL1 tumor cells. After tumors established and grew to ˜150 mm³, mice were randomly assigned to one of the following treatments: 1) non-transduced (NTD) T cells, 2) mesoCAR T cells, 3) mesoCAR T cells +sodium stibogluconate (SSG; a chemical inhibitor of SHP1), 4) mesoCAR/dnSHP1 T cells. T cells were injected IV once at a dose of 10×10⁶ T cells/mouse. SSG was administered IM at 20 mg/kg every 2 days. Tumors were measured serially. AT the end, mice were sacrificed, tumors were harvested, digested, processed into single cell suspension, and subjected to flow cytometry analysis. The tumor infiltrating lymphocytes (TILs) were also isolated and tested for function ex-vivo.

### Results/Conclusion:

[1340] In vitro, mesoCAR T cells demonstrated suppressed lysis of EMMESO-PDL1 tumor cells compared to EMMESO cells. MesoCAR/dnSHP1 T cells were able to lyse EMMESO-PDL1 and EMMESO tumor cells with similar efficiency. AntiCD3 restimulation of T cells revealed enhanced secreation of TNF-alpha and IL2 by mesoCAR/dnSHP1 vs. mesoCAR T cells as measured by ICS. In vivo, SSG injections had minimal impact on mesoCAR T cell control of tumors, whereas mesoCAR/dnSHP1 T cells demonstrated significantly enhanced control of EMMESO-PDL1 tumor growth compared to mesoCAR T cells (60% greater decrease in tumor volume compared to mesoCAR T cells). TIL infiltration was 3-fold higher in tumors harvested from mice that received mesoCAR/dnSHP1 T cells compared to other groups. Isolated mesoCAR/dnSHP1 TILs demonstrated the greatest ex-vivo lysis of fresh tumor cells. DnSHP1 engineering is a powerful and novel way of blocking the suppression of CAR T cells by PD1 and other similar IRs.

### Example 12: Impact of Dominant Negative SHP on TCR Signaling and Cytokine Production in the Presence of PD-L1

[1341] This example examines the impact of dominant negative SHP (dnSHP) on T cells in the presence of PD-L1-expressing tumor cells.

[1342] T cells were transduced to express the mesothelin directed CAR SS1BBz (“CARGFP cells”), SS1BBz and SHP-1 SH2-N R30K (SEQ ID NO: 41) (“dnSHP1 CAR cells”), SS1BBz and SHP-2 SH2-N R32K (SEQ ID NO: 44) (“dnSHP2 CAR cells”), or SS1BBz, SHP-1 SH2-N R30K (SEQ ID NO: 41), and SHP-2 SH2-N R32K (SEQ ID NO: 44) (“dnSHP1&2 CAR cells”). The construct co-expressing SHP-1 SH2-N R30K and SHP-2 SH2-N R32K comprises the nucleotide sequence of SEQ ID NO: 51. In this construct, the nucleotide sequence encoding SHP-1 SH2-N R30K (SEQ ID NO: 63) and the nucleotide sequence encoding SHP-2 SH2-N R32K (SEQ ID NO: 64) are separated by a nucleotide sequence encoding the P2A cleavage site.

(SEQ ID NO: 51)
atggtgcgatggtttcaccgagatctgagcggtctggatgccgaa
acgctgctgaaaggccgcggagtacacggatccttcctggcaaag
cctagtcgaaaaaaccaaggagacttttccttgagcgttcgggtg
ggtgatcaggtaactcacatccgaatccaaaattccggcgatttt
tatgatctgtacggaggcgaaaaattcgcaactctgaccgagctg
gtcgagtattatacacagcagcagggagtactgcaggaccgcgat
gggaccatcattcatctcaaatacccgctgGGAAGCGGAGCTACT
AACTTCAGCCTGCTGAAGCAGGCTGGAGACGTGGAGGAGAACCCT
GGACCTATGACAAGTAGAAGGTGGTTCCATCCAAACATTACGGGG
GTGGAAGCTGAAAACCTTCTGCTCACGAGGGGTGTGGACGGTTCT
TTCCTTGCCAAACCGAGTAAATCTAATCCCGGTGATTTCACTCTT
TCCGTTCGCCGGAATGGAGCAGTCACACACATAAAAATCCAGAAC
ACGGGTGACTATTATGATCTGTATGGCGGGGAGAAGTTTGCAACT
CTGGCAGAACTGGTGCAGTATTACATGGAGCACCATGGGCAACTG
AAGGAGAAGAATGGAGATGTTATTGAACTGAAGTATCCATTG
(SEQ ID NO: 63)
atggtgcgatggtttcaccgagatctgagcggtctggatgccgaa
acgctgctgaaaggccgcggagtacacggatccttcctggcaaag
cctagtcgaaaaaaccaaggagacttttccttgagcgttcgggtg
ggtgatcaggtaactcacatccgaatccaaaattccggcgatttt
tatgatctgtacggaggcgaaaaattcgcaactctgaccgagctg
gtcgagtattatacacagcagcagggagtactgcaggaccgcgat
gggaccatcattcatctcaaatacccgctg
(SEQ ID NO: 64)
ATGACAAGTAGAAGGTGGTTCCATCCAAACATTACGGGGGTGGAA
GCTGAAAACCTTCTGCTCACGAGGGGTGTGGACGGTTCTTTCCTT
GCCAAACCGAGTAAATCTAATCCCGGTGATTTCACTCTTTCCGTT
CGCCGGAATGGAGCAGTCACACACATAAAAATCCAGAACACGGGT
GACTATTATGATCTGTATGGCGGGGAGAAGTTTGCAACTCTGGCA
GAACTGGTGCAGTATTACATGGAGCACCATGGGCAACTGAAGGAG
AAGAATGGAGATGTTATTGAACTGAAGTATCCATTG

[1343] In a first study, phospho-flow cytometry was performed on activated human 25 CARGFP cells, dnSHP1 CAR cells, dnSHP2 CAR cells, and dnSHP1&2 CAR cells that were co-cultured with EMMESO tumor cells or EMMESO-PD-L1 tumor cells for 0 to 90 minutes. As shown in FIG. 16B, PD-L1 expression on tumor cells decreased the level of phosphorylated Zap70 (pZap70; downstream TCR signaling molecule) on CARGFP T cells. However, CAR T cells with dnSHP1, dnSHP2, or dnSHP1&2 were relatively unaffected (FIG. 16B).

[1344] In a second study, CARGFP cells, dnSHP1 CAR cells, dnSHP2 CAR cells, and dnSHP1&2 CAR cells were co-cultured with EMMESO-PD-L1 tumor cells at 1:1 ratio for 4 days. Fresh tumor cells were fed during the co-culture. At the end of the 4 days, the cells were stimulated for 18 hours with cross-linked anti-CD3 antibody (10 g/ml) in the presence of monensin/brefeldin and were subjected to intracellular flow cytometry staining. As shown in FIG. 17, CAR T cells with the dnSHP1, dnSHP2, or dnSHP1&2 constructs had greater IFNγ and IL2 staining.

### EQUIVALENTS

[1345] The disclosures of each and every patent, patent application, and publication cited herein are hereby incorporated herein by reference in their entirety. While this invention has been disclosed with reference to specific aspects, it is apparent that other aspects and variations of this invention may be devised by others skilled in the art without departing from the true spirit and scope of the invention. The appended claims are intended to be construed to include all such aspects and equivalent variations.

1. A nucleic acid composition comprising
(a) a nucleic acid molecule encoding a chimeric antigen receptor (CAR) polypeptide and
(b) a nucleic acid molecule encoding an SHP inhibitor polypeptide, wherein said SHP inhibitor polypeptide comprises a mutation in the ITIM-binding region and a mutation in the catalytic domain.

2. The nucleic acid composition of claim 1, wherein the SHP inhibitor polypeptide comprises the amino acid sequence of SEQ ID NO:1 or 2, or a fragment thereof, or an amino acid sequence at least 90% identical to SEQ ID NO:1 or 2.

3. The nucleic acid composition of claim 1, wherein the SHP inhibitor polypeptide has reduced binding, compared to a wild-type SHP, or to an ITIM domain from one or more proteins selected from PD1, PDCD1, BTLA4, LILRB1, LAIR1, CTLA4, KIR2DL 1, KIR2DL4, KIR2DL5, KIR3DL 1, or KIR3DL3.

4-6. (canceled)

7. The nucleic acid composition of claim 1-5, wherein the SHP inhibitor polypeptide comprises a sequence at least 90%, 95%, 97%, 98%, or 99% identical to SEQ ID NO: 3 or 4, wherein X is any amino acid except R.

8-20. (canceled)

21. The nucleic acid composition of claim 1, wherein the mutation of the SHP inhibitor polypeptide is a deletion of at least part or all of the phosphatase domain.

22-36. (canceled)

37. The nucleic acid composition of claim 1, wherein:
the SHP inhibitor polypeptide comprises the amino acid sequence of SEQ ID NO: 41, 42, 43, or 44.

38. The nucleic acid composition of claim 1, wherein the CAR polypeptide and the SHP inhibitor polypeptide ae encoded by a single nucleic acid molecule in the same frame and as a single polypeptide chain.

39-46. (canceled)

47. The nucleic acid composition of claim 1, wherein the encoded CAR polypeptide comprises an antigen binding domain, a transmembrane domain, and an intracellular signalling domain.

48-50. (canceled)

51. The nucleic acid composition of claim 1, wherein the antigen binding domain binds a tumor antigen.

52-60. (canceled)

61. A vector comprising the nucleic acid composition of claim 1.

62-63. (canceled)

64. A polypeptide comprising a CAR polypeptide, a SHP inhibitor polypeptide, and a peptide cleavage site disposed therebetween, wherein the SHP inhibitor polypeptide comprises a mutation in the ITIM-binding region and the catalytic domain.

65-67. (canceled)

68. An immune effector cell comprising a chimeric antigen receptor (CAR) polypeptide and an SHP inhibitor polypeptide, wherein said SHP inhibitor polypeptide comprises a mutation in the ITIM-binding region and the catalytic domain.

69-70. (canceled)

71. The immune effector cell of claim 68, wherein the immune effector cell is a human T cell wherein the T cell is diacylglycerol kinase (DGK) and/or Ikaros deficient.

72-77. (canceled)

78. A method of providing anti-tumor immunity in a subject in need thereof, the method comprising administering to the subject an effective amount of the immune effector cell of claim 68.

79. A method of treating a disease associated with expression of a cancer antigen in a subject in need thereof, comprising administering to the subject an effective amount of the immune effector cell of claim 68, thereby treating the subject.

80-83. (canceled)

84. The method of claim 79, wherein the disease is selected from the group consisting of a proliferative disease, a precancerous condition, a cancer, and a non-cancer related indication associated with expression of the tumor antigen.

85. (canceled)

86. The method of claim 79, wherein the disease is a cancer i-s selected from the group consisting of colon cancer, rectal cancer, renal-cell carcinoma, liver cancer, non-small cell carcinoma of the lung, cancer of the small intestine, cancer of the esophagus, melanoma, bone cancer, pancreatic cancer, skin cancer, cancer of the head or neck, cutaneous or intraocular malignant melanoma, uterine cancer, ovarian cancer, rectal cancer, cancer of the anal region, stomach cancer, testicular cancer, uterine cancer, carcinoma of the fallopian tubes, carcinoma of the endometrium, carcinoma of the cervix, carcinoma of the vagina, carcinoma of the vulva, Hodgkin's Disease, non-Hodgkin lymphoma, cancer of the endocrine system, cancer of the thyroid gland, cancer of the parathyroid gland, cancer of the adrenal gland, sarcoma of soft tissue, cancer of the urethra, cancer of the penis, solid tumors of childhood, cancer of the bladder, cancer of the kidney or ureter, carcinoma of the renal pelvis, neoplasm of the central nervous system (CNS), primary CNS lymphoma, tumor angiogenesis, spinal axis tumor, brain stem glioma, pituitary adenoma, Kaposi's sarcoma, epidermoid cancer, squamous cell cancer, T-cell lymphoma, environmentally induced cancers, combinations of said cancers, and metastatic lesions of said cancers.

87. The method of claim 79, wherein the disease is a hematologic cancer selected from chronic lymphocytic leukemia (CLL), acute leukemias, acute lymphoid leukemia (ALL), B-cell acute lymphoid leukemia (B-ALL), T-cell acute lymphoid leukemia (T-ALL), chronic myelogenous leukemia (CML), B cell prolymphocytic leukemia, blastic plasmacytoid dendritic cell neoplasm, Burkitt's lymphoma, diffuse large B cell lymphoma, follicular lymphoma, hairy cell leukemia, small cell- or a large cell-follicular lymphoma, malignant lymphoproliferative conditions, MALT lymphoma, mantle cell lymphoma, marginal zone lymphoma, multiple myeloma, myelodysplasia and myelodysplastic syndrome, non-Hodgkin's lymphoma, Hodgkin's lymphoma, plasmablastic lymphoma, plasmacytoid dendritic cell neoplasm, Waldenstrom macroglobulinemia, or pre-leukemia.

88-89. (canceled)

90. The nucleic acid composition of claim 1 further comprising
(1) one or more components of a gene editing system targeting one or more sites within a gene encoding the SHP inhibitor polypeptide or a regulatory element thereof, a nucleic acid molecule encoding the one or more components of the gene editing system, or a combination thereof, or
(2) an agent that has RNAi or antisense inhibition activity against the SHP inhibitor polypeptide, or a nucleic acid molecule encoding the agent.

91-122. (canceled)

The application's sequence listing, which the Patent Office published only in electronic form, follows.

SEQUENCE LISTING (3449 sequences)

SEQ ID NO: 1 - protein, 595 aa, Homo sapiens
MVRWFHRDLSGLDAETLLKGRGVHGSFLARPSRKNQGDFSLSVRVGDQVTHIRIQNSGDFYDLYGGEKFATLTELVEYYTQQQGVLQDRDGTIIHLKYPLNCSDPTSERWYHGHMSGGQAETLLQAKGEPWTFLVRESLSQPGDFVLSVLSDQPKAGPGSPLRVTHIKVMCEGGRYTVGGLETFDSLTDLVEHFKKTGIEEASGAFVYLRQPYYATRVNAADIENRVLELNKKQESEDTAKAGFWEEFESLQKQEVKNLHQRLEGQRPENKGKNRYKNILPFDHSRVILQGRDSNIPGSDYINANYIKNQLLGPDENAKTYIASQGCLEATVNDFWQMAWQENSRVIVMTTREVEKGRNKCVPYWPEVGMQRAYGPYSVTNCGEHDTTEYKLRTLQVSPLDNGDLIREIWHYQYLSWPDHGVPSEPGGVLSFLDQINQRQESLPHAGPIIVHCSAGIGRTGTIIVIDMLMENISTKGLDCDIDIQKTIQMVRAQRSGMVQTEAQYKFIYVAIAQFIETTKKKLEVLQSQKGQESEYGNITYPPAMKNAHAKASRTSSKHKEDVYENLHTKNKREEKVKKQRSADKEKSKGSLKRK

SEQ ID NO: 2 - protein, 597 aa, Homo sapiens
MTSRRWFHPNITGVEAENLLLTRGVDGSFLARPSKSNPGDFTLSVRRNGAVTHIKIQNTGDYYDLYGGEKFATLAELVQYYMEHHGQLKEKNGDVIELKYPLNCADPTSERWFHGHLSGKEAEKLLTEKGKHGSFLVRESQSHPGDFVLSVRTGDDKGESNDGKSKVTHVMIRCQELKYDVGGGERFDSLTDLVEHYKKNPMVETLGTVLQLKQPLNTTRINAAEIESRVRELSKLAETTDKVKQGFWEEFETLQQQECKLLYSRKEGQRQENKNKNRYKNILPFDHTRVVLHDGDPNEPVSDYINANIIMPEFETKCNNSKPKKSYIATQGCLQNTVNDFWRMVFQENSRVIVMTTKEVERGKSKCVKYWPDEYALKEYGVMRVRNVKESAAHDYTLRELKLSKVGQALLQGNTERTVWQYHFRTWPDHGVPSDPGGVLDFLEEVHHKQESIMDAGPVVVHCSAGIGRTGTFIVIDILIDIIREKGVDCDIDVPKTIQMVRSQRSGMVQTEAQYRFIYMAVQHYIETLQRRIEEEQKSKRKGHEYTNIKYSLADQTSGDQSPLPPCTPTPPCAEMREDSARVYENVGLMQQQKSFR

SEQ ID NO: 3 - protein, 100 aa, unidentified
  MOD_RES 30: note = Any amino acid
  REGION 1..100: note = source = /note="Description of Unknown: SHP-1 sequence"
MVRWFHRDLSGLDAETLLKGRGVHGSFLAXPSRKNQGDFSLSVRVGDQVTHIRIQNSGDFYDLYGGEKFATLTELVEYYTQQQGVLQDRDGTIIHLKYPL

SEQ ID NO: 4 - protein, 102 aa, unidentified
  MOD_RES 32: note = Any amino acid
  REGION 1..102: note = source = /note="Description of Unknown: SHP-2 sequence"
MTSRRWFHPNITGVEAENLLLTRGVDGSFLAXPSKSNPGDFTLSVRRNGAVTHIKIQNTGDYYDLYGGEKFATLAELVQYYMEHHGQLKEKNGDVIELKYPL

SEQ ID NO: 5 - protein, 41 aa, synthetic construct
  REGION 1..41: note = source = /note="Description of Artificial Sequence: Synthetic polypeptide"
RSKRSRLLHSDYMNMTPRRPGPTRKHYQPYAPPRDFAAYRS

SEQ ID NO: 6 - DNA, 123 bp, synthetic construct
  misc_feature 1..123: note = source = /note="Description of Artificial Sequence: Synthetic polynucleotide"
  source 1..123: mol_type = other DNA
aggagtaagaggagcaggctcctgcacagtgactacatgaacatgactccccgccgccccgggcccacccgcaagcattaccagccctatgccccaccacgcgacttcgcagcctatcgctcc

SEQ ID NO: 7 - DNA, 123 bp, synthetic construct
  misc_feature 1..123: note = source = /note="Description of Artificial Sequence: Synthetic polynucleotide"
  source 1..123: mol_type = other DNA
aggagtaagaggagcaggctcctgcacagtgactacatgttcatgactccccgccgccccgggcccacccgcaagcattaccagccctatgccccaccacgcgacttcgcagcctatcgctcc

SEQ ID NO: 8 - DNA, 123 bp, synthetic construct
  misc_feature 1..123: note = source = /note="Description of Artificial Sequence: Synthetic polynucleotide"
  source 1..123: mol_type = other DNA
aggagtaagaggagcaggctcctgcacagtgacttcatgaacatgactccccgccgccccgggcccacccgcaagcattaccagccctatgccccaccacgcgacttcgcagcctatcgctcc

SEQ ID NO: 9 - DNA, 123 bp, synthetic construct
  misc_feature 1..123: note = source = /note="Description of Artificial Sequence: Synthetic polynucleotide"
  source 1..123: mol_type = other DNA
aggagtaagaggagcaggctcctgcacagtgacttcatgttcatgactccccgccgccccgggcccacccgcaagcattaccagccctatgccccaccacgcgacttcgcagcctatcgctcc

SEQ ID NO: 10 - protein, 10 aa, synthetic construct
  REGION 1..10: note = source = /note="Description of Artificial Sequence: Synthetic peptide"
GGGGSGGGGS

SEQ ID NO: 11 - DNA, 30 bp, synthetic construct
  misc_feature 1..30: note = source = /note="Description of Artificial Sequence: Synthetic oligonucleotide"
  source 1..30: mol_type = other DNA
ggtggcggaggttctggaggtggaggttcc

SEQ ID NO: 12 - protein, 24 aa, synthetic construct
  REGION 1..24: note = source = /note="Description of Artificial Sequence: Synthetic peptide"
IYIWAPLAGTCGVLLLSLVITLYC

SEQ ID NO: 13 - DNA, 72 bp, synthetic construct
  misc_feature 1..72: note = source = /note="Description of Artificial Sequence: Synthetic oligonucleotide"
  source 1..72: mol_type = other DNA
atctacatctgggcgcccttggccgggacttgtggggtccttctcctgtcactggttatcaccctttactgc

SEQ ID NO: 14 - protein, 42 aa, synthetic construct
  REGION 1..42: note = source = /note="Description of Artificial Sequence: Synthetic polypeptide"
KRGRKKLLYIFKQPFMRPVQTTQEEDGCSCRFPEEEEGGCEL

SEQ ID NO: 15 - DNA, 126 bp, synthetic construct
  misc_feature 1..126: note = source = /note="Description of Artificial Sequence: Synthetic polynucleotide"
  source 1..126: mol_type = other DNA
aaacggggcagaaagaaactcctgtatatattcaaacaaccatttatgagaccagtacaaactactcaagaggaagatggctgtagctgccgatttccagaagaagaagaaggaggatgtgaactg

SEQ ID NO: 16 - protein, 48 aa, synthetic construct
  REGION 1..48: note = source = /note="Description of Artificial Sequence: Synthetic polypeptide"
QRRKYRSNKGESPVEPAEPCRYSCPREEEGSTIPIQEDYRKPEPACSP

SEQ ID NO: 17 - DNA, 123 bp, synthetic construct; identical to SEQ ID NO: 6
  misc_feature 1..123: note = source = /note="Description of Artificial Sequence: Synthetic polynucleotide"
  source 1..123: mol_type = other DNA

SEQ ID NO: 18 - protein, 112 aa, synthetic construct
  REGION 1..112: note = source = /note="Description of Artificial Sequence: Synthetic polypeptide"
RVKFSRSADAPAYKQGQNQLYNELNLGRREEYDVLDKRRGRDPEMGGKPRRKNPQEGLYNELQKDKMAEAYSEIGMKGERRRGKGHDGLYQGLSTATKDTYDALHMQALPPR

SEQ ID NO: 19 - DNA, 336 bp, synthetic construct
  misc_feature 1..336: note = source = /note="Description of Artificial Sequence: Synthetic polynucleotide"
  source 1..336: mol_type = other DNA
agagtgaagttcagcaggagcgcagacgcccccgcgtacaagcagggccagaaccagctctataacgagctcaatctaggacgaagagaggagtacgatgttttggacaagagacgtggccgggaccctgagatggggggaaagccgagaaggaagaaccctcaggaaggcctgtacaatgaactgcagaaagataagatggcggaggcctacagtgagattgggatgaaaggcgagcgccggaggggcaaggggcacgatggcctttaccagggtctcagtacagccaccaaggacacctacgacgcccttcacatgcaggccctgccccctcgc

SEQ ID NO: 20 - protein, 112 aa, synthetic construct
  REGION 1..112: note = source = /note="Description of Artificial Sequence: Synthetic polypeptide"
RVKFSRSADAPAYQQGQNQLYNELNLGRREEYDVLDKRRGRDPEMGGKPRRKNPQEGLYNELQKDKMAEAYSEIGMKGERRRGKGHDGLYQGLSTATKDTYDALHMQALPPR

SEQ ID NO: 21 - DNA, 336 bp, synthetic construct
  misc_feature 1..336: note = source = /note="Description of Artificial Sequence: Synthetic polynucleotide"
  source 1..336: mol_type = other DNA
agagtgaagttcagcaggagcgcagacgcccccgcgtaccagcagggccagaaccagctctataacgagctcaatctaggacgaagagaggagtacgatgttttggacaagagacgtggccgggaccctgagatggggggaaagccgagaaggaagaaccctcaggaaggcctgtacaatgaactgcagaaagataagatggcggaggcctacagtgagattgggatgaaaggcgagcgccggaggggcaaggggcacgatggcctttaccagggtctcagtacagccaccaaggacacctacgacgcccttcacatgcaggccctgccccctcgc

SEQ ID NO: 22 - protein, 5 aa, synthetic construct
  REGION 1..5: note = source = /note="Description of Artificial Sequence: Synthetic peptide"
GGGGS

SEQ ID NO: 23 - DNA, 30 bp, synthetic construct; identical to SEQ ID NO: 11
  misc_feature 1..30: note = source = /note="Description of Artificial Sequence: Synthetic oligonucleotide"
  source 1..30: mol_type = other DNA

SEQ ID NO: 24 - protein, 150 aa, synthetic construct [sequence omitted]

SEQ ID NO: 25 - DNA, 450 bp, synthetic construct
  misc_feature 1..450: note = source = /note="Description of Artificial Sequence: Synthetic polynucleotide"
  source 1..450: mol_type = other DNA
cccggatggtttctggactctccggatcgcccgtggaatcccccaaccttctcaccggcactcttggttgtgactgagggcgataatgcgaccttcacgtgctcgttctccaacacctccgaatcattcgtgctgaactggtaccgcatgagcccgtcaaaccagaccgacaagctcgccgcgtttccggaagatcggtcgcaaccgggacaggattgtcggttccgcgtgactcaactgccgaatggcagagacttccacatgagcgtggtccgcgctaggcgaaacgactccgggacctacctgtgcggagccatctcgctggcgcctaaggcccaaatcaaagagagcttgagggccgaactgagagtgaccgagcgcagagctgaggtgccaactgcacatccatccccatcgcctcggcctgcggggcagtttcagaccctggtc

SEQ ID NO: 26 - protein, 394 aa, synthetic construct
  REGION 1..394: note = source = /note="Description of Artificial Sequence: Synthetic polypeptide"
MALPVTALLLPLALLLHAARPPGWFLDSPDRPWNPPTFSPALLVVTEGDNATFTCSFSNTSESFVLNWYRMSPSNQTDKLAAFPEDRSQPGQDCRFRVTQLPNGRDFHMSVVRARRNDSGTYLCGAISLAPKAQIKESLRAELRVTERRAEVPTAHPSPSPRPAGQFQTLVTTTPAPRPPTPAPTIASQPLSLRPEACRPAAGGAVHTRGLDFACDIYIWAPLAGTCGVLLLSLVITLYCKRGRKKLLYIFKQPFMRPVQTTQEEDGCSCRFPEEEEGGCELRVKFSRSADAPAYKQGQNQLYNELNLGRREEYDVLDKRRGRDPEMGGKPRRKNPQEGLYNELQKDKMAEAYSEIGMKGERRRGKGHDGLYQGLSTATKDTYDALHMQALPPR

SEQ ID NO: 27 - DNA, 1182 bp, synthetic construct
  misc_feature 1..1182: note = source = /note="Description of Artificial Sequence: Synthetic polynucleotide"
  source 1..1182: mol_type = other DNA
atggccctccctgtcactgccctgcttctccccctcgcactcctgctccacgccgctagaccacccggatggtttctggactctccggatcgcccgtggaatcccccaaccttctcaccggcactcttggttgtgactgagggcgataatgcgaccttcacgtgctcgttctccaacacctccgaatcattcgtgctgaactggtaccgcatgagcccgtcaaaccagaccgacaagctcgccgcgtttccggaagatcggtcgcaaccgggacaggattgtcggttccgcgtgactcaactgccgaatggcagagacttccacatgagcgtggtccgcgctaggcgaaacgactccgggacctacctgtgcggagccatctcgctggcgcctaaggcccaaatcaaagagagcttgagggccgaactgagagtgaccgagcgcagagctgaggtgccaactgcacatccatccccatcgcctcggcctgcggggcagtttcagaccctggtcacgaccactccggcgccgcgcccaccgactccggccccaactatcgcgagccagcccctgtcgctgaggccggaagcatgccgccctgccgccggaggtgctgtgcatacccggggattggacttcgcatgcgacatctacatttgggctcctctcgccggaacttgtggcgtgctccttctgtccctggtcatcaccctgtactgcaagcggggtcggaaaaagcttctgtacattttcaagcagcccttcatgaggcccgtgcaaaccacccaggaggaggacggttgctcctgccggttccccgaagaggaagaaggaggttgcgagctgcgcgtgaagttctcccggagcgccgacgcccccgcctataagcagggccagaaccagctgtacaacgaactgaacctgggacggcgggaagagtacgatgtgctggacaagcggcgcggccgggaccccgaaatgggcgggaagcctagaagaaagaaccctcaggaaggcctgtataacgagctgcagaaggacaagatggccgaggcctactccgaaattgggatgaagggagagcggcggaggggaaaggggcacgacggcctgtaccaaggactgtccaccgccaccaaggacacatacgatgccctgcacatgcaggcccttccccctcgc

SEQ ID NO: 28 - protein, 40 aa, synthetic construct
  REGION 1..40: note = MISC_FEATURE - /note="This sequence may encompass 1-10 'Gly Gly Gly Ser' repeating units"
  REGION 1..40: note = source = /note="Description of Artificial Sequence: Synthetic polypeptide"
  REGION 1..40: note = source = /note="See specification as filed for detailed description of substitutions and preferred embodiments"
GGGSGGGSGGGSGGGSGGGSGGGSGGGSGGGSGGGSGGGS

SEQ ID NO: 29 - protein, 20 aa, synthetic construct
  REGION 1..20: note = source = /note="Description of Artificial Sequence: Synthetic peptide"
GGGGSGGGGSGGGGSGGGGS

SEQ ID NO: 30 - protein, 15 aa, synthetic construct
  REGION 1..15: note = source = /note="Description of Artificial Sequence: Synthetic peptide"
GGGGSGGGGSGGGGS

SEQ ID NO: 31 - protein, 4 aa, synthetic construct
  REGION 1..4: note = source = /note="Description of Artificial Sequence: Synthetic peptide"
GGGS

SEQ ID NO: 32 - DNA, 2000 bp, synthetic construct
  misc_feature 1..2000: note = /note="This sequence may encompass 50-2000 nucleotides"
  misc_feature 1..2000: note = source = /note="Description of Artificial Sequence: Synthetic polynucleotide"
  misc_feature 1..2000: note = source = /note="See specification as filed for detailed description of substitutions and preferred embodiments"
  source 1..2000: mol_type = other DNA
aaaaaaaaaaaaaaaaaaaaaaaaaaaaaaaaaaaaaaaaaaaaaaaaaaaaaaaaaaaaaaaaaaaaaaaaaaaaaaaaaaaaaaaaaaaaaaaaaaaaaaaaaaaaaaaaaaaaaaaaaaaaaaaaaaaaaaaaaaaaaaaaaaaaaaaaaaaaaaaaaaaaaaaaaaaaaaaaaaaaaaaaaaaaaaaaaaaaaaaaaaaaaaaaaaaaaaaaaaaaaaaaaaaaaaaaaaaaaaaaaaaaaaaaaaaaaaaaaaaaaaaaaaaaaaaaaaaaaaaaaaaaaaaaaaaaaaaaaaaaaaaaaaaaaaaaaaaaaaaaaaaaaaaaaaaaaaaaaaaaaaaaaaaaaaaaaaaaaaaaaaaaaaaaaaaaaaaaaaaaaaaaaaaaaaaaaaaaaaaaaaaaaaaaaaaaaaaaaaaaaaaaaaaaaaaaaaaaaaaaaaaaaaaaaaaaaaaaaaaaaaaaaaaaaaaaaaaaaaaaaaaaaaaaaaaaaaaaaaaaaaaaaaaaaaaaaaaaaaaaaaaaaaaaaaaaaaaaaaaaaaaaaaaaaaaaaaaaaaaaaaaaaaaaaaaaaaaaaaaaaaaaaaaaaaaaaaaaaaaaaaaaaaaaaaaaaaaaaaaaaaaaaaaaaaaaaaaaaaaaaaaaaaaaaaaaaaaaaaaaaaaaaaaaaaaaaaaaaaaaaaaaaaaaaaaaaaaaaaaaaaaaaaaaaaaaaaaaaaaaaaaaaaaaaaaaaaaaaaaaaaaaaaaaaaaaaaaaaaaaaaaaaaaaaaaaaaaaaaaaaaaaaaaaaaaaaaaaaaaaaaaaaaaaaaaaaaaaaaaaaaaaaaaaaaaaaaaaaaaaaaaaaaaaaaaaaaaaaaaaaaaaaaaaaaaaaaaaaaaaaaaaaaaaaaaaaaaaaaaaaaaaaaaaaaaaaaaaaaaaaaaaaaaaaaaaaaaaaaaaaaaaaaaaaaaaaaaaaaaaaaaaaaaaaaaaaaaaaaaaaaaaaaaaaaaaaaaaaaaaaaaaaaaaaaaaaaaaaaaaaaaaaaaaaaaaaaaaaaaaaaaaaaaaaaaaaaaaaaaaaaaaaaaaaaaaaaaaaaaaaaaaaaaaaaaaaaaaaaaaaaaaaaaaaaaaaaaaaaaaaaaaaaaaaaaaaaaaaaaaaaaaaaaaaaaaaaaaaaaaaaaaaaaaaaaaaaaaaaaaaaaaaaaaaaaaaaaaaaaaaaaaaaaaaaaaaaaaaaaaaaaaaaaaaaaaaaaaaaaaaaaaaaaaaaaaaaaaaaaaaaaaaaaaaaaaaaaaaaaaaaaaaaaaaaaaaaaaaaaaaaaaaaaaaaaaaaaaaaaaaaaaaaaaaaaaaaaaaaaaaaaaaaaaaaaaaaaaaaaaaaaaaaaaaaaaaaaaaaaaaaaaaaaaaaaaaaaaaaaaaaaaaaaaaaaaaaaaaaaaaaaaaaaaaaaaaaaaaaaaaaaaaaaaaaaaaaaaaaaaaaaaaaaaaaaaaaaaaaaaaaaaaaaaaaaaaaaaaaaaaaaaaaaaaaaaaaaaaaaaaaaaaaaaaaaaaaaaaaaaaaaaaaaaaaaaaaaaaaaaaaaaaaaaaaaaaaaaaaaaaaaaaaaaaaaaaaaaaaaaaaaaaaaaaaaaaaaaaaaaaaaaaaaaaaaaaaaaaaaaaaaaaaaaaaaaaaaaaaaaaaaaaaaaaaaaaaaaaaaaaaaaaaaaaaaaaaaaaaaaaaaaaaaaaaaaaaaaaaaaaaaaaaaaaaaaaaaaaaaaaaaaaaaaaaaaaaaaaaaaaaaaaaaaaaaaaaaaaaaaaaaaaaaaaaaaaaaaaaaaaaaaaaaaaaaaaaaaaaaaaaaaaaaaaaaaaaaaaaaaaaaaaaaaaaaaaaaaaaaaaaaaaaaaaaaaaaaaaaaaaaaaaaaaaaaaaaaaaaaaaaaaaaaaaaaaaaaaaaaaaaaaaaaaaaaaaaaaaaaaaaaaaaaaaaaaaaaaaaaaaaaaaaaaaaaaaaaaaaaaaaaaaaaaaaaaaaaaaaaa

SEQ ID NO: 33 - DNA, 150 bp, synthetic construct
  misc_feature 1..150: note = source = /note="Description of Artificial Sequence: Synthetic polynucleotide"
  source 1..150: mol_type = other DNA
aaaaaaaaaaaaaaaaaaaaaaaaaaaaaaaaaaaaaaaaaaaaaaaaaaaaaaaaaaaaaaaaaaaaaaaaaaaaaaaaaaaaaaaaaaaaaaaaaaaaaaaaaaaaaaaaaaaaaaaaaaaaaaaaaaaaaaaaaaaaaaaaaaaaaa

SEQ ID NO: 34 - DNA, 5000 bp, synthetic construct
  misc_feature 1..5000: note = /note="This sequence may encompass 50-5000 nucleotides"
  misc_feature 1..5000: note = source = /note="Description of Artificial Sequence: Synthetic polynucleotide"
  misc_feature 1..5000: note = source = /note="See specification as filed for detailed description of substitutions and preferred embodiments"
  source 1..5000: mol_type = other DNA
aaaaaaaaaaaaaaaaaaaaaaaaaaaaaaaaaaaaaaaaaaaaaaaaaaaaaaaaaaaaaaaaaaaaaaaaaaaaaaaaaaaaaaaaaaaaaaaaaaaaaaaaaaaaaaaaaaaaaaaaaaaaaaaaaaaaaaaaaaaaaaaaaaaaaaaaaaaaaaaaaaaaaaaaaaaaaaaaaaaaaaaaaaaaaaaaaaaaaaaaaaaaaaaaaaaaaaaaaaaaaaaaaaaaaaaaaaaaaaaaaaaaaaaaaaaaaaaaaaaaaaaaaaaaaaaaaaaaaaaaaaaaaaaaaaaaaaaaaaaaaaaaaaaaaaaaaaaaaaaaaaaaaaaaaaaaaaaaaaaaaaaaaaaaaaaaaaaaaaaaaaaaaaaaaaaaaaaaaaaaaaaaaaaaaaaaaaaaaaaaaaaaaaaaaaaaaaaaaaaaaaaaaaaaaaaaaaaaaaaaaaaaaaaaaaaaaaaaaaaaaaaaaaaaaaaaaaaaaaaaaaaaaaaaaaaaaaaaaaaaaaaaaaaaaaaaaaaaaaaaaaaaaaaaaaaaaaaaaaaaaaaaaaaaaaaaaaaaaaaaaaaaaaaaaaaaaaaaaaaaaaaaaaaaaaaaaaaaaaaaaaaaaaaaaaaaaaaaaaaaaaaaaaaaaaaaaaaaaaaaaaaaaaaaaaaaaaaaaaaaaaaaaaaaaaaaaaaaaaaaaaaaaaaaaaaaaaaaaaaaaaaaaaaaaaaaaaaaaaaaaaaaaaaaaaaaaaaaaaaaaaaaaaaaaaaaaaaaaaaaaaaaaaaaaaaaaaaaaaaaaaaaaaaaaaaaaaaaaaaaaaaaaaaaaaaaaaaaaaaaaaaaaaaaaaaaaaaaaaaaaaaaaaaaaaaaaaaaaaaaaaaaaaaaaaaaaaaaaaaaaaaaaaaaaaaaaaaaaaaaaaaaaaaaaaaaaaaaaaaaaaaaaaaaaaaaaaaaaaaaaaaaaaaaaaaaaaaaaaaaaaaaaaaaaaaaaaaaaaaaaaaaaaaaaaaaaaaaaaaaaaaaaaaaaaaaaaaaaaaaaaaaaaaaaaaaaaaaaaaaaaaaaaaaaaaaaaaaaaaaaaaaaaaaaaaaaaaaaaaaaaaaaaaaaaaaaaaaaaaaaaaaaaaaaaaaaaaaaaaaaaaaaaaaaaaaaaaaaaaaaaaaaaaaaaaaaaaaaaaaaaaaaaaaaaaaaaaaaaaaaaaaaaaaaaaaaaaaaaaaaaaaaaaaaaaaaaaaaaaaaaaaaaaaaaaaaaaaaaaaaaaaaaaaaaaaaaaaaaaaaaaaaaaaaaaaaaaaaaaaaaaaaaaaaaaaaaaaaaaaaaaaaaaaaaaaaaaaaaaaaaaaaaaaaaaaaaaaaaaaaaaaaaaaaaaaaaaaaaaaaaaaaaaaaaaaaaaaaaaaaaaaaaaaaaaaaaaaaaaaaaaaaaaaaaaaaaaaaaaaaaaaaaaaaaaaaaaaaaaaaaaaaaaaaaaaaaaaaaaaaaaaaaaaaaaaaaaaaaaaaaaaaaaaaaaaaaaaaaaaaaaaaaaaaaaaaaaaaaaaaaaaaaaaaaaaaaaaaaaaaaaaaaaaaaaaaaaaaaaaaaaaaaaaaaaaaaaaaaaaaaaaaaaaaaaaaaaaaaaaaaaaaaaaaaaaaaaaaaaaaaaaaaaaaaaaaaaaaaaaaaaaaaaaaaaaaaaaaaaaaaaaaaaaaaaaaaaaaaaaaaaaaaaaaaaaaaaaaaaaaaaaaaaaaaaaaaaaaaaaaaaaaaaaaaaaaaaaaaaaaaaaaaaaaaaaaaaaaaaaaaaaaaaaaaaaaaaaaaaaaaaaaaaaaaaaaaaaaaaaaaaaaaaaaaaaaaaaaaaaaaaaaaaaaaaaaaaaaaaaaaaaaaaaaaaaaaaaaaaaaaaaaaaaaaaaaaaaaaaaaaaaaaaaaaaaaaaaaaaaaaaaaaaaaaaaaaaaaaaaaaaaaaaaaaaaaaaaaaaaaaaaaaaaaaaaaaaaaaaaaaaaaaaaaaaaaaaaaaaaaaaaaaaaaaaaaaaaaaaaaaaaaaaaaaaaaaaaaaaaaaaaaaaaaaaaaaaaaaaaaaaaaaaaaaaaaaaaaaaaaaaaaaaaaaaaaaaaaaaaaaaaaaaaaaaaaaaaaaaaaaaaaaaaaaaaaaaaaaaaaaaaaaaaaaaaaaaaaaaaaaaaaaaaaaaaaaaaaaaaaaaaaaaaaaaaaaaaaaaaaaaaaaaaaaaaaaaaaaaaaaaaaaaaaaaaaaaaaaaaaaaaaaaaaaaaaaaaaaaaaaaaaaaaaaaaaaaaaaaaaaaaaaaaaaaaaaaaaaaaaaaaaaaaaaaaaaaaaaaaaaaaaaaaaaaaaaaaaaaaaaaaaaaaaaaaaaaaaaaaaaaaaaaaaaaaaaaaaaaaaaaaaaaaaaaaaaaaaaaaaaaaaaaaaaaaaaaaaaaaaaaaaaaaaaaaaaaaaaaaaaaaaaaaaaaaaaaaaaaaaaaaaaaaaaaaaaaaaaaaaaaaaaaaaaaaaaaaaaaaaaaaaaaaaaaaaaaaaaaaaaaaaaaaaaaaaaaaaaaaaaaaaaaaaaaaaaaaaaaaaaaaaaaaaaaaaaaaaaaaaaaaaaaaaaaaaaaaaaaaaaaaaaaaaaaaaaaaaaaaaaaaaaaaaaaaaaaaaaaaaaaaaaaaaaaaaaaaaaaaaaaaaaaaaaaaaaaaaaaaaaaaaaaaaaaaaaaaaaaaaaaaaaaaaaaaaaaaaaaaaaaaaaaaaaaaaaaaaaaaaaaaaaaaaaaaaaaaaaaaaaaaaaaaaaaaaaaaaaaaaaaaaaaaaaaaaaaaaaaaaaaaaaaaaaaaaaaaaaaaaaaaaaaaaaaaaaaaaaaaaaaaaaaaaaaaaaaaaaaaaaaaaaaaaaaaaaaaaaaaaaaaaaaaaaaaaaaaaaaaaaaaaaaaaaaaaaaaaaaaaaaaaaaaaaaaaaaaaaaaaaaaaaaaaaaaaaaaaaaaaaaaaaaaaaaaaaaaaaaaaaaaaaaaaaaaaaaaaaaaaaaaaaaaaaaaaaaaaaaaaaaaaaaaaaaaaaaaaaaaaaaaaaaaaaaaaaaaaaaaaaaaaaaaaaaaaaaaaaaaaaaaaaaaaaaaaaaaaaaaaaaaaaaaaaaaaaaaaaaaaaaaaaaaaaaaaaaaaaaaaaaaaaaaaaaaaaaaaaaaaaaaaaaaaaaaaaaaaaaaaaaaaaaaaaaaaaaaaaaaaaaaaaaaaaaaaaaaaaaaaaaaaaaaaaaaaaaaaaaaaaaaaaaaaaaaaaaaaaaaaaaaaaaaaaaaaaaaaaaaaaaaaaaaaaaaaaaaaaaaaaaaaaaaaaaaaaaaaaaaaaaaaaaaaaaaaaaaaaaaaaaaaaaaaaaaaaaaaaaaaaaaaaaaaaaaaaaaaaaaaaaaaaaaaaaaaaaaaaaaaaaaaaaaaaaaaaaaaaaaaaaaaaaaaaaaaaaaaaaaaaaaaaaaaaaaaaaaaaaaaaaaaaaaaaaaaaaaaaaaaaaaaaaaaaaaaaaaaaaaaaaaaaaaaaaaaaaaaaaaaaaaaaaaaaaaaaaaaaaaaaaaaaaaaaaaaaaaaaaaaaaaaaaaaaaaaaaaaaaaaaaaaaaaaaaaaaaaaaaaaaaaaaaaaaaaaaaaaaaaaaaaaaaaaaaaaaaaaaaaaaaaaaaaaaaaaaaaaaaaaaaaaaaaaaaaaaaaaaaaaaaaaaaaaaaaaaaaaaaaaaaaaaaaaaaaaaaaaaaaaaaaaaaaaaaaaaaaaaaaaaaaaaaaaaaaaaaaaaaaaaaaaaaaaaaaaaaaaaaaaaaaaaaaaaaaaaaaaaaaaaaaaaaaaaaaaaaaaaaaaaaaaaaaaaaaaaaaaaaaaaaaaaaaaaaaaaaaaaaaaaaaaaaaaaaaaaaaaaaaaaaaaaaaaaaaaaaaaaaaaaaaaaaaaaaaaaaaaaaaaaaaaaaaaaaaaaaaaaaaaaaaaaaaaaaaaaaaaaaaaaaaaaaaaaaaaaaaaaaaaaaaaaaaaaaaaaaaaaaaaaaaaaaaaaaaaaaaaaaaaaaaaaaaaaaaaaaaaaaaaaaaaaaaaaaaaaaaaaaaaaaaaaaaaaaaaaaaaaaaaaaaaaaaaaaaaaaaaaaaaaaaaaaaaaaaaaaaaaaaaaaaaaaaaaaaaaaaaaaaaaaaaaaaaaaaaaaaaaaaaaaaaaaaaaaaaaaaaaaaaaaaaaaaaaaaaaaaaaaaaaaaaaaaaaaaaaaaaaaaaaaaaaaaaaaaaaaaaaaaaaaaaaaaaaaaaaaaaaaaaaaaaaaaaaaaaaaaaaaaaaaaaaaaaaaaaaaaaaaaaaaaaaaaaaaaaaaaaaaaaaaaaaaaaaaaaaaaaaaaaaaaaaaaaaaaaaaaaaaaaaaaaaaaaaaaaaaaaaaaaaaaaaaaaaaaaaaaaaaaaaaaaaaaaaaaaaaaaaaaaaaaaaaaaaaaaaaaaaaaaaaaaaaaaaaaaaaaaaaaaaaaaaaaaaaaaaaaaaaaaaaaaaaaaaaaaaaaaaaaaaaaaaaaaaaaaaaaaaaaaaaaaaaaaaaaaaaaaaaaaaaaaaaaaaaaaaaaaaaaaaaaaaaaaaaaaaaaaaaaaaaaaaaaaaaaaaaaaaaaaaaaaaaaaaaaaaaaaaaaaaaaaaaaaaaaaaaaaaaaaaaaaaaaaaaaaaaaaaaaaaaaaaaaaaaaaaaaaaaaaaaaaaaaaaaaaaaaaaaaaaaaaaaaaaaaaaaaaaaaaaaaaaaaaaaaaaaaaaaaaaaaaaaaaaaaaaaaaaaaaaaaaaaaaaaaaaaaaaaaaaaaaaaaaaaaaaaaaaaaaaaaaaaaaaaaaaaaaaaaaaaaaaaaaaaaaaaaaaaaaaaaaaaaaaaaaaaaaaaaaaaaaaaaaaaaaaaaaaaaaaaaaaaaaaaaaaaaaaaaaaaaaaaaaaaaaaaaaaaaaaaaaaaaaaaaaaaaaaaaaaaaaaaaaaaaaaaaaaaaaaaaaaaaaaaaaaaaaaaaaaaaaaaaaaaaaaaaaaaaaaaaaaaaaaaaaaaaaaaa

SEQ ID NO: 35 - DNA, 100 bp, synthetic construct
  misc_feature 1..100: note = source = /note="Description of Artificial Sequence: Synthetic polynucleotide"
  source 1..100: mol_type = other DNA
tttttttttttttttttttttttttttttttttttttttttttttttttttttttttttttttttttttttttttttttttttttttttttttttttttt

SEQ ID NO: 36 - DNA, 5000 bp, synthetic construct
  misc_feature 1..5000: note = /note="This sequence may encompass 50-5000 nucleotides"
  misc_feature 1..5000: note = source = /note="Description of Artificial Sequence: Synthetic polynucleotide"
  misc_feature 1..5000: note = source = /note="See specification as filed for detailed description of substitutions and preferred embodiments"
  source 1..5000: mol_type = other DNA
tttttttttttttttttttttttttttttttttttttttttttttttttttttttttttttttttttttttttttttttttttttttttttttttttttttttttttttttttttttttttttttttttttttttttttttttttttttttttttttttttttttttttttttttttttttttttttttttttttttttttttttttttttttttttttttttttttttttttttttttttttttttttttttttttttttttttttttttttttttttttttttttttttttttttttttttttttttttttttttttttttttttttttttttttttttttttttttttttttttttttttttttttttttttttttttttttttttttttttttttttttttttttttttttttttttttttttttttttttttttttttttttttttttttttttttttttttttttttttttttttttttttttttttttttttttttttttttttttttttttttttttttttttttttttttttttttttttttttttttttttttttttttttttttttttttttttttttttttttttttttttttttttttttttttttttttttttttttttttttttttttttttttttttttttttttttttttttttttttttttttttttttttttttttttttttttttttttttttttttttttttttttttttttttttttttttttttttttttttttttttttttttttttttttttttttttttttttttttttttttttttttttttttttttttttttttttttttttttttttttttttttttttttttttttttttttttttttttttttttttttttttttttttttttttttttttttttttttttttttttttttttttttttttttttttttttttttttttttttttttttttttttttttttttttttttttttttttttttttttttttttttttttttttttttttttttttttttttttttttttttttttttttttttttttttttttttttttttttttttttttttttttttttttttttttttttttttttttttttttttttttttttttttttttttttttttttttttttttttttttttttttttttttttttttttttttttttttttttttttttttttttttttttttttttttttttttttttttttttttttttttttttttttttttttttttttttttttttttttttttttttttttttttttttttttttttttttttttttttttttttttttttttttttttttttttttttttttttttttttttttttttttttttttttttttttttttttttttttttttttttttttttttttttttttttttttttttttttttttttttttttttttttttttttttttttttttttttttttttttttttttttttttttttttttttttttttttttttttttttttttttttttttttttttttttttttttttttttttttttttttttttttttttttttttttttttttttttttttttttttttttttttttttttttttttttttttttttttttttttttttttttttttttttttttttttttttttttttttttttttttttttttttttttttttttttttttttttttttttttttttttttttttttttttttttttttttttttttttttttttttttttttttttttttttttttttttttttttttttttttttttttttttttttttttttttttttttttttttttttttttttttttttttttttttttttttttttttttttttttttttttttttttttttttttttttttttttttttttttttttttttttttttttttttttttttttttttttttttttttttttttttttttttttttttttttttttttttttttttttttttttttttttttttttttttttttttttttttttttttttttttttttttttttttttttttttttttttttttttttttttttttttttttttttttttttttttttttttttttttttttttttttttttttttttttttttttttttttttttttttttttttttttttttttttttttttttttttttttttttttttttttttttttttttttttttttttttttttttttttttttttttttttttttttttttttttttttttttttttttttttttttttttttttttttttttttttttttttttttttttttttttttttttttttttttttttttttttttttttttttttttttttttttttttttttttttttttttttttttttttttttttttttttttttttttttttttttttttttttttttttttttttttttttttttttttttttttttttttttttttttttttttttttttttttttttttttttttttttttttttttttttttttttttttttttttttttttttttttttttttttttttttttttttttttttttttttttttttttttttttttttttttttttttttttttttttttttttttttttttttttttttttttttttttttttttttttttttttttttttttttttttttttttttttttttttttttttttttttttttttttttttttttttttttttttttttttttttttttttttttttttttttttttttttttttttttttttttttttttttttttttttttttttttttttttttttttttttttttttttttttttttttttttttttttttttttttttttttttttttttttttttttttttttttttttttttttttttttttttttttttttttttttttttttttttttttttttttttttttttttttttttttttttttttttttttttttttttttttttttttttttttttttttttttttttttttttttttttttttttttttttttttttttttttttttttttttttttttttttttttttttttttttttttttttttttttttttttttttttttttttttttttttttttttttttttttttttttttttttttttttttttttttttttttttttttttttttttttttttttttttttttttttttttttttttttttttttttttttttttttttttttttttttttttttttttttttttttttttttttttttttttttttttttttttttttttttttttttttttttttttttttttttttttttttttttttttttttttttttttttttttttttttttttttttttttttttttttttttttttttttttttttttttttttttttttttttttttttttttttttttttttttttttttttttttttttttttttttttttttttttttttttttttttttttttttttttttttttttttttttttttttttttttttttttttttttttttttttttttttttttttttttttttttttttttttttttttttttttttttttttttttttttttttttttttttttttttttttttttttttttttttttttttttttttttttttttttttttttttttttttttttttttttttttttttttttttttttttttttttttttttttttttttttttttttttttttttttttttttttttttttttttttttttttttttttttttttttttttttttttttttttttttttttttttttttttttttttttttttttttttttttttttttttttttttttttttttttttttttttttttttttttttttttttttttttttttttttttttttttttttttttttttttttttttttttttttttttttttttttttttttttttttttttttttttttttttttttttttttttttttttttttttttttttttttttttttttttttttttttttttttttttttttttttttttttttttttttttttttttttttttttttttttttttttttttttttttttttttttttttttttttttttttttttttttttttttttttttttttttttttttttttttttttttttttttttttttttttttttttttttttttttttttttttttttttttttttttttttttttttttttttttttttttttttttttttttttttttttttttttttttttttttttttttttttttttttttttttttttttttttttttttttttttttttttttttttttttttttttttttttttttttttttttttttttttttttttttttttttttttttttttttttttttttttttttttttttttttttttttttttttttttttttttttttttttttttttttttttttttttttttttttttttttttttttttttttttttttttttttttttttttttttttttttttttttttttttttttttttttttttttttttttttttttttttttttttttttttttttttttttttttttttttttttttttttttttttttttttttttttttttttttttttttttttttttttttttttttttttttttttttttttttttttttttttttttttttttttttttttttttttttttttttttttttttttttttttttttttttttttttttttttttttttttttttttttttttttttttttttttttttttttttttttttttttttttttttttttttttttttttttttttttttttttttttttttttttttttttttttttttttttttttttttttttttttttttttttttttttttttttttttttttttttttttttttttttttttttttttttttttttttttttttttttttttttttttttttttttttttttt

SEQ ID NO: 37 - DNA, 5000 bp, synthetic construct; identical to SEQ ID NO: 34
  misc_feature 1..5000: note = /note="This sequence may encompass 100-5000 nucleotides"
  misc_feature 1..5000: note = source = /note="Description of Artificial Sequence: Synthetic polynucleotide"
  misc_feature 1..5000: note = source = /note="See specification as filed for detailed description of substitutions and preferred embodiments"
  source 1..5000: mol_type = other DNA

SEQ ID NO: 38 - DNA, 400 bp, synthetic construct
  misc_feature 1..400: note = /note="This sequence may encompass 100-400 nucleotides"
  misc_feature 1..400: note = source = /note="Description of Artificial Sequence: Synthetic polynucleotide"
  misc_feature 1..400: note = source = /note="See specification as filed for detailed description of substitutions and preferred embodiments"
  source 1..400: mol_type = other DNA
aaaaaaaaaaaaaaaaaaaaaaaaaaaaaaaaaaaaaaaaaaaaaaaaaaaaaaaaaaaaaaaaaaaaaaaaaaaaaaaaaaaaaaaaaaaaaaaaaaaaaaaaaaaaaaaaaaaaaaaaaaaaaaaaaaaaaaaaaaaaaaaaaaaaaaaaaaaaaaaaaaaaaaaaaaaaaaaaaaaaaaaaaaaaaaaaaaaaaaaaaaaaaaaaaaaaaaaaaaaaaaaaaaaaaaaaaaaaaaaaaaaaaaaaaaaaaaaaaaaaaaaaaaaaaaaaaaaaaaaaaaaaaaaaaaaaaaaaaaaaaaaaaaaaaaaaaaaaaaaaaaaaaaaaaaaaaaaaaaaaaaaaaaaaaaaaaaaaaaaaaaaaaaaaaaaaaaaaaaaaaaaaaaaaaaaaaaaaaaaa

SEQ ID NO: 39 - protein, 373 aa, synthetic construct
  REGION 1..373: note = source = /note="Description of Artificial Sequence: Synthetic polypeptide"
PGWFLDSPDRPWNPPTFSPALLVVTEGDNATFTCSFSNTSESFVLNWYRMSPSNQTDKLAAFPEDRSQPGQDCRFRVTQLPNGRDFHMSVVRARRNDSGTYLCGAISLAPKAQIKESLRAELRVTERRAEVPTAHPSPSPRPAGQFQTLVTTTPAPRPPTPAPTIASQPLSLRPEACRPAAGGAVHTRGLDFACDIYIWAPLAGTCGVLLLSLVITLYCKRGRKKLLYIFKQPFMRPVQTTQEEDGCSCRFPEEEEGGCELRVKFSRSADAPAYKQGQNQLYNELNLGRREEYDVLDKRRGRDPEMGGKPRRKNPQEGLYNELQKDKMAEAYSEIGMKGERRRGKGHDGLYQGLSTATKDTYDALHMQALPPR

SEQ ID NO: 40 - protein, 100 aa, Homo sapiens
MVRWFHRDLSGLDAETLLKGRGVHGSFLARPSRKNQGDFSLSVRVGDQVTHIRIQNSGDFYDLYGGEKFATLTELVEYYTQQQGVLQDRDGTIIHLKYPL

SEQ ID NO: 41 - protein, 100 aa, synthetic construct
  REGION 1..100: note = source = /note="Description of Artificial Sequence: Synthetic polypeptide"
MVRWFHRDLSGLDAETLLKGRGVHGSFLAKPSRKNQGDFSLSVRVGDQVTHIRIQNSGDFYDLYGGEKFATLTELVEYYTQQQGVLQDRDGTIIHLKYPL

SEQ ID NO: 42 - protein, 100 aa, synthetic construct
  REGION 1..100: note = source = /note="Description of Artificial Sequence: Synthetic polypeptide"
MVRWFHRDLSGLDAETLLKGRGVHGSFLAHPSRKNQGDFSLSVRVGDQVTHIRIQNSGDFYDLYGGEKFATLTELVEYYTQQQGVLQDRDGTIIHLKYPL

SEQ ID NO: 43 - protein, 102 aa, Homo sapiens
MTSRRWFHPNITGVEAENLLLTRGVDGSFLARPSKSNPGDFTLSVRRNGAVTHIKIQNTGDYYDLYGGEKFATLAELVQYYMEHHGQLKEKNGDVIELKYPL

SEQ ID NO: 44 - protein, 102 aa, synthetic construct
  REGION 1..102: note = source = /note="Description of Artificial Sequence: Synthetic polypeptide"
MTSRRWFHPNITGVEAENLLLTRGVDGSFLAKPSKSNPGDFTLSVRRNGAVTHIKIQNTGDYYDLYGGEKFATLAELVQYYMEHHGQLKEKNGDVIELKYPL

SEQ ID NO: 45 - protein, 102 aa, synthetic construct
  REGION 1..102: note = source = /note="Description of Artificial Sequence: Synthetic polypeptide"
MTSRRWFHPNITGVEAENLLLTRGVDGSFLAHPSKSNPGDFTLSVRRNGAVTHIKIQNTGDYYDLYGGEKFATLAELVQYYMEHHGQLKEKNGDVIELKYPL

SEQ ID NO: 46 - protein, 101 aa, unidentified
  MOD_RES 32: note = Any amino acid
  REGION 1..101: note = source = /note="Description of Unknown: SHP-2 sequence"
MTSRRWFHPNITGVEAENLLLTRGVDGSFLAXSKSNPGDFTLSVRRNGAVTHIKIQNTGDYYDLYGGEKFATLAELVQYYMEHHGQLKEKNGDVIELKYPL

SEQ ID NO: 47-51 - skipped (5 entries)

SEQ ID NO: 52 - protein, 132 aa, synthetic construct
  REGION 1..132: note = source = /note="Description of Artificial Sequence: Synthetic polypeptide"
DVPDYASLGGPSSPKKKRKVSRGVQVETISPGDGRTFPKRGQTCVVHYTGMLEDGKKFDSSRDRNKPFKFMLGKQEVIRGWEEGVAQMSVGQRAKLTISPDYAYGATGHPGIIPPHATLVFDVELLKLETSY

SEQ ID NO: 53 - protein, 108 aa, synthetic construct
  REGION 1..108: note = source = /note="Description of Artificial Sequence: Synthetic polypeptide"
VQVETISPGDGRTFPKRGQTCVVHYTGMLEDGKKFDSSRDRNKPFKFMLGKQEVIRGWEEGVAQMSVGQRAKLTISPDYAYGATGHPGIIPPHATLVFDVELLKLETS

SEQ ID NO: 54 - protein, 93 aa, synthetic construct [sequence omitted]

SEQ ID NO: 55 - protein, 95 aa, synthetic construct
  REGION 1..95: note = source = /note="Description of Artificial Sequence: Synthetic polypeptide"
ILWHEMWHEGLIEASRLYFGERNVKGMFEVLEPLHAMMERGPQTLKETSFNQAYGRDLMEAQEWCRKYMKSGNVKDLTQAWDLYYHVFRRISKTS

SEQ ID NO: 56 - protein, 95 aa, synthetic construct
  REGION 1..95: note = source = /note="Description of Artificial Sequence: Synthetic polypeptide"
ILWHEMWHEGLLEASRLYFGERNVKGMFEVLEPLHAMMERGPQTLKETSFNQAYGRDLMEAQEWCRKYMKSGNVKDLTQAWDLYYHVFRRISKTS

SEQ ID NO: 57 - protein, 95 aa, synthetic construct
  REGION 1..95: note = source = /note="Description of Artificial Sequence: Synthetic polypeptide"
ILWHEMWHEGLEEASRLYFGERNVKGMFEVLEPLHAMMERGPQTLKETSFNQAYGRDLMEAQEWCRKYMKSGNVKDLLQAWDLYYHVFRRISKTS

SEQ ID NO: 58 - protein, 95 aa, synthetic construct
  MOD_RES 12: note = Any amino acid
  MOD_RES 78: note = Any amino acid
  REGION 1..95: note = source = /note="Description of Artificial Sequence: Synthetic polypeptide"
ILWHEMWHEGLXEASRLYFGERNVKGMFEVLEPLHAMMERGPQTLKETSFNQAYGRDLMEAQEWCRKYMKSGNVKDLXQAWDLYYHVFRRISKTS

SEQ ID NO: 59 - protein, 95 aa, synthetic construct
  REGION 1..95: note = source = /note="Description of Artificial Sequence: Synthetic polypeptide"
ILWHEMWHEGLIEASRLYFGERNVKGMFEVLEPLHAMMERGPQTLKETSFNQAYGRDLMEAQEWCRKYMKSGNVKDLLQAWDLYYHVFRRISKTS

SEQ ID NO: 60 - protein, 95 aa, synthetic construct
  REGION 1..95: note = source = /note="Description of Artificial Sequence: Synthetic polypeptide"
ILWHEMWHEGLLEASRLYFGERNVKGMFEVLEPLHAMMERGPQTLKETSFNQAYGRDLMEAQEWCRKYMKSGNVKDLLQAWDLYYHVFRRISKTS

SEQ ID NO: 61 - protein, 1132 aa, Homo sapiens [sequence omitted]

SEQ ID NO: 62 - DNA, 4027 bp, Homo sapiens
  source 1..4027: mol_type = genomic DNA
caggcagcgtggtcctgctgcgcacgtgggaagccctggccccggccacccccgcgatgccgcgcgctccccgctgccgagccgtgcgctccctgctgcgcagccactaccgcgaggtgctgccgctggccacgttcgtgcggcgcctggggccccagggctggcggctggtgcagcgcggggacccggcggctttccgcgcgctggtggcccagtgcctggtgtgcgtgccctgggacgcacggccgccccccgccgccccctccttccgccaggtgtcctgcctgaaggagctggtggcccgagtgctgcagaggctgtgcgagcgcggcgcgaagaacgtgctggccttcggcttcgcgctgctggacggggcccgcgggggcccccccgaggccttcaccaccagcgtgcgcagctacctgcccaacacggtgaccgacgcactgcgggggagcggggcgtgggggctgctgttgcgccgcgtgggcgacgacgtgctggttcacctgctggcacgctgcgcgctctttgtgctggtggctcccagctgcgcctaccaggtgtgcgggccgccgctgtaccagctcggcgctgccactcaggcccggcccccgccacacgctagtggaccccgaaggcgtctgggatgcgaacgggcctggaaccatagcgtcagggaggccggggtccccctgggcctgccagccccgggtgcgaggaggcgcgggggcagtgccagccgaagtctgccgttgcccaagaggcccaggcgtggcgctgcccctgagccggagcggacgcccgttgggcaggggtcctgggcccacccgggcaggacgcgtggaccgagtgaccgtggtttctgtgtggtgtcacctgccagacccgccgaagaagccacctctttggagggtgcgctctctggcacgcgccactcccacccatccgtgggccgccagcaccacgcgggccccccatccacatcgcggccaccacgtccctgggacacgccttgtcccccggtgtacgccgagaccaagcacttcctctactcctcaggcgacaaggagcagctgcggccctccttcctactcagctctctgaggcccagcctgactggcgctcggaggctcgtggagaccatctttctgggttccaggccctggatgccagggactccccgcaggttgccccgcctgccccagcgctactggcaaatgcggcccctgtttctggagctgcttgggaaccacgcgcagtgcccctacggggtgctcctcaagacgcactgcccgctgcgagctgcggtcaccccagcagccggtgtctgtgcccgggagaagccccagggctctgtggcggcccccgaggaggaggacacagacccccgtcgcctggtgcagctgctccgccagcacagcagcccctggcaggtgtacggcttcgtgcgggcctgcctgcgccggctggtgcccccaggcctctggggctccaggcacaacgaacgccgcttcctcaggaacaccaagaagttcatctccctggggaagcatgccaagctctcgctgcaggagctgacgtggaagatgagcgtgcggggctgcgcttggctgcgcaggagcccaggggttggctgtgttccggccgcagagcaccgtctgcgtgaggagatcctggccaagttcctgcactggctgatgagtgtgtacgtcgtcgagctgctcaggtctttcttttatgtcacggagaccacgtttcaaaagaacaggctctttttctaccggaagagtgtctggagcaagttgcaaagcattggaatcagacagcacttgaagagggtgcagctgcgggagctgtcggaagcagaggtcaggcagcatcgggaagccaggcccgccctgctgacgtccagactccgcttcatccccaagcctgacgggctgcggccgattgtgaacatggactacgtcgtgggagccagaacgttccgcagagaaaagagggccgagcgtctcacctcgagggtgaaggcactgttcagcgtgctcaactacgagcgggcgcggcgccccggcctcctgggcgcctctgtgctgggcctggacgatatccacagggcctggcgcaccttcgtgctgcgtgtgcgggcccaggacccgccgcctgagctgtactttgtcaaggtggatgtgacgggcgcgtacgacaccatcccccaggacaggctcacggaggtcatcgccagcatcatcaaaccccagaacacgtactgcgtgcgtcggtatgccgtggtccagaaggccgcccatgggcacgtccgcaaggccttcaagagccacgtctctaccttgacagacctccagccgtacatgcgacagttcgtggctcacctgcaggagaccagcccgctgagggatgccgtcgtcatcgagcagagctcctccctgaatgaggccagcagtggcctcttcgacgtcttcctacgcttcatgtgccaccacgccgtgcgcatcaggggcaagtcctacgtccagtgccaggggatcccgcagggctccatcctctccacgctgctctgcagcctgtgctacggcgacatggagaacaagctgtttgcggggattcggcgggacgggctgctcctgcgtttggtggatgatttcttgttggtgacacctcacctcacccacgcgaaaaccttcctcaggaccctggtccgaggtgtccctgagtatggctgcgtggtgaacttgcggaagacagtggtgaacttccctgtagaagacgaggccctgggtggcacggcttttgttcagatgccggcccacggcctattcccctggtgcggcctgctgctggatacccggaccctggaggtgcagagcgactactccagctatgcccggacctccatcagagccagtctcaccttcaaccgcggcttcaaggctgggaggaacatgcgtcgcaaactctttggggtcttgcggctgaagtgtcacagcctgtttctggatttgcaggtgaacagcctccagacggtgtgcaccaacatctacaagatcctcctgctgcaggcgtacaggtttcacgcatgtgtgctgcagctcccatttcatcagcaagtttggaagaaccccacatttttcctgcgcgtcatctctgacacggcctccctctgctactccatcctgaaagccaagaacgcagggatgtcgctgggggccaagggcgccgccggccctctgccctccgaggccgtgcagtggctgtgccaccaagcattcctgctcaagctgactcgacaccgtgtcacctacgtgccactcctggggtcactcaggacagcccagacgcagctgagtcggaagctcccggggacgacgctgactgccctggaggccgcagccaacccggcactgccctcagacttcaagaccatcctggactgatggccacccgcccacagccaggccgagagcagacaccagcagccctgtcacgccgggctctacgtcccagggagggaggggcggcccacacccaggcccgcaccgctgggagtctgaggcctgagtgagtgtttggccgaggcctgcatgtccggctgaaggctgagtgtccggctgaggcctgagcgagtgtccagccaagggctgagtgtccagcacacctgccgtcttcacttccccacaggctggcgctcggctccaccccagggccagcttttcctcaccaggagcccggcttccactccccacataggaatagtccatccccagattcgccattgttcacccctcgccctgccctcctttgccttccacccccaccatccaggtggagaccctgagaaggaccctgggagctctgggaatttggagtgaccaaaggtgtgccctgtacacaggcgaggaccctgcacctggatgggggtccctgtgggtcaaattggggggaggtgctgtgggagtaaaatactgaatatatgagtttttcagttttgaaaaaaaaaaaaaaaaaa

SEQ ID NO: 63-77 - skipped (15 entries)

SEQ ID NO: 78 - protein, 30 aa, synthetic construct
  REGION 1..30: note = MISC_FEATURE - /note="This sequence may encompass 1-6 'Gly Gly Gly Gly Ser' repeating units"
  REGION 1..30: note = source = /note="Description of Artificial Sequence: Synthetic polypeptide"
  REGION 1..30: note = source = /note="See specification as filed for detailed description of substitutions and preferred embodiments"
GGGGSGGGGSGGGGSGGGGSGGGGSGGGGS

SEQ ID NO: 79-111 - skipped (33 entries)

SEQ ID NO: 112 - protein, 4 aa, synthetic construct
  REGION 1..4: note = source = /note="Description of Artificial Sequence: Synthetic peptide"
RGDS

SEQ ID NO: 113-399 - skipped (287 entries)

SEQ ID NO: 400 - DNA, 1184 bp, synthetic construct
  misc_feature 1..1184: note = source = /note="Description of Artificial Sequence: Synthetic polynucleotide"
  source 1..1184: mol_type = other DNA
cgtgaggctccggtgcccgtcagtgggcagagcgcacatcgcccacagtccccgagaagttggggggaggggtcggcaattgaaccggtgcctagagaaggtggcgcggggtaaactgggaaagtgatgtcgtgtactggctccgcctttttcccgagggtgggggagaaccgtatataagtgcagtagtcgccgtgaacgttctttttcgcaacgggtttgccgccagaacacaggtaagtgccgtgtgtggttcccgcgggcctggcctctttacgggttatggcccttgcgtgccttgaattacttccacctggctgcagtacgtgattcttgatcccgagcttcgggttggaagtgggtgggagagttcgaggccttgcgcttaaggagccccttcgcctcgtgcttgagttgaggcctggcctgggcgctggggccgccgcgtgcgaatctggtggcaccttcgcgcctgtctcgctgctttcgataagtctctagccatttaaaatttttgatgacctgctgcgacgctttttttctggcaagatagtcttgtaaatgcgggccaagatctgcacactggtatttcggtttttggggccgcgggcggcgacggggcccgtgcgtcccagcgcacatgttcggcgaggcggggcctgcgagcgcggccaccgagaatcggacgggggtagtctcaagctggccggcctgctctggtgcctggcctcgcgccgccgtgtatcgccccgccctgggcggcaaggctggcccggtcggcaccagttgcgtgagcggaaagatggccgcttcccggccctgctgcagggagctcaaaatggaggacgcggcgctcgggagagcgggcgggtgagtcacccacacaaaggaaaagggcctttccgtcctcagccgtcgcttcatgtgactccacggagtaccgggcgccgtccaggcacctcgattagttctcgagcttttggagtacgtcgtctttaggttggggggaggggttttatgcgatggagtttccccacactgagtgggtggagactgaagttaggccagcttggcacttgatgtaattctccttggaatttgccctttttgagtttggatcttggttcattctcaagcctcagacagtggttcaaagtttttttcttccatttcaggtgtcgtga

SEQ ID NO: 401 - protein, 21 aa, synthetic construct
  REGION 1..21: note = source = /note="Description of Artificial Sequence: Synthetic peptide"
MALPVTALLLPLALLLHAARP

SEQ ID NO: 402 - DNA, 63 bp, synthetic construct
  misc_feature 1..63: note = source = /note="Description of Artificial Sequence: Synthetic oligonucleotide"
  source 1..63: mol_type = other DNA
atggccctgcctgtgacagccctgctgctgcctctggctctgctgctgcatgccgctagaccc

SEQ ID NO: 403 - protein, 45 aa, synthetic construct
  REGION 1..45: note = source = /note="Description of Artificial Sequence: Synthetic polypeptide"
TTTPAPRPPTPAPTIASQPLSLRPEACRPAAGGAVHTRGLDFACD

SEQ ID NO: 404 - DNA, 135 bp, synthetic construct
  misc_feature 1..135: note = source = /note="Description of Artificial Sequence: Synthetic polynucleotide"
  source 1..135: mol_type = other DNA
accacgacgccagcgccgcgaccaccaacaccggcgcccaccatcgcgtcgcagcccctgtccctgcgcccagaggcgtgccggccagcggcggggggcgcagtgcacacgagggggctggacttcgcctgtgat

SEQ ID NO: 405 - protein, 230 aa, synthetic construct
  REGION 1..230: note = source = /note="Description of Artificial Sequence: Synthetic polypeptide"
ESKYGPPCPPCPAPEFLGGPSVFLFPPKPKDTLMISRTPEVTCVVVDVSQEDPEVQFNWYVDGVEVHNAKTKPREEQFNSTYRVVSVLTVLHQDWLNGKEYKCKVSNKGLPSSIEKTISKAKGQPREPQVYTLPPSQEEMTKNQVSLTCLVKGFYPSDIAVEWESNGQPENNYKTTPPVLDSDGSFFLYSRLTVDKSRWQEGNVFSCSVMHEALHNHYTQKSLSLSLGKM

SEQ ID NO: 406 - DNA, 690 bp, synthetic construct
  misc_feature 1..690: note = source = /note="Description of Artificial Sequence: Synthetic polynucleotide"
  source 1..690: mol_type = other DNA
gagagcaagtacggccctccctgccccccttgccctgcccccgagttcctgggcggacccagcgtgttcctgttcccccccaagcccaaggacaccctgatgatcagccggacccccgaggtgacctgtgtggtggtggacgtgtcccaggaggaccccgaggtccagttcaactggtacgtggacggcgtggaggtgcacaacgccaagaccaagccccgggaggagcagttcaatagcacctaccgggtggtgtccgtgctgaccgtgctgcaccaggactggctgaacggcaaggaatacaagtgtaaggtgtccaacaagggcctgcccagcagcatcgagaaaaccatcagcaaggccaagggccagcctcgggagccccaggtgtacaccctgccccctagccaagaggagatgaccaagaaccaggtgtccctgacctgcctggtgaagggcttctaccccagcgacatcgccgtggagtgggagagcaacggccagcccgagaacaactacaagaccaccccccctgtgctggacagcgacggcagcttcttcctgtacagccggctgaccgtggacaagagccggtggcaggagggcaacgtctttagctgctccgtgatgcacgaggccctgcacaaccactacacccagaagagcctgagcctgtccctgggcaagatg

SEQ ID NO: 407 - protein, 282 aa, synthetic construct
  REGION 1..282: note = source = /note="Description of Artificial Sequence: Synthetic polypeptide"
RWPESPKAQASSVPTAQPQAEGSLAKATTAPATTRNTGRGGEEKKKEKEKEEQEERETKTPECPSHTQPLGVYLLTPAVQDLWLRDKATFTCFVVGSDLKDAHLTWEVAGKVPTGGVEEGLLERHSNGSQSQHSRLTLPRSLWNAGTSVTCTLNHPSLPPQRLMALREPAAQAPVKLSLNLLASSDPPEAASWLLCEVSGFSPPNILLMWLEDQREVNTSGFAPARPPPQPGSTTFWAWSVLRVPAPPSPQPATYTCVVSHEDSRTLLNASRSLEVSYVTDH

SEQ ID NO: 408 - DNA, 847 bp, synthetic construct
  misc_feature 1..847: note = source = /note="Description of Artificial Sequence: Synthetic polynucleotide"
  source 1..847: mol_type = other DNA
aggtggcccgaaagtcccaaggcccaggcatctagtgttcctactgcacagccccaggcagaaggcagcctagccaaagctactactgcacctgccactacgcgcaatactggccgtggcggggaggagaagaaaaaggagaaagagaaagaagaacaggaagagagggagaccaagacccctgaatgtccatcccatacccagccgctgggcgtctatctcttgactcccgcagtacaggacttgtggcttagagataaggccacctttacatgtttcgtcgtgggctctgacctgaaggatgcccatttgacttgggaggttgccggaaaggtacccacagggggggttgaggaagggttgctggagcgccattccaatggctctcagagccagcactcaagactcacccttccgagatccctgtggaacgccgggacctctgtcacatgtactctaaatcatcctagcctgcccccacagcgtctgatggcccttagagagccagccgcccaggcaccagttaagcttagcctgaatctgctcgccagtagtgatcccccagaggccgccagctggctcttatgcgaagtgtccggctttagcccgcccaacatcttgctcatgtggctggaggaccagcgagaagtgaacaccagcggcttcgctccagcccggcccccaccccagccgggttctaccacattctgggcctggagtgtcttaagggtcccagcaccacctagcccccagccagccacatacacctgtgttgtgtcccatgaagatagcaggaccctgctaaatgcttctaggagtctggaggtttcctacgtgactgaccatt

SEQ ID NO: 409 - protein, 107 aa, synthetic construct
  REGION 1..107: note = source = /note="Description of Artificial Sequence: Synthetic polypeptide"
DIQMTQTTSSLSASLGDRVTISCRASQDISKYLNWYQQKPDGTVKLLIYHTSRLHSGVPSRFSGSGSGTDYSLTISNLEQEDIATYFCQQGNTLPYTFGGGTKLEIT

SEQ ID NO: 410 - protein, 120 aa, synthetic construct
  REGION 1..120: note = source = /note="Description of Artificial Sequence: Synthetic polypeptide"
EVKLQESGPGLVAPSQSLSVTCTVSGVSLPDYGVSWIRQPPRKGLEWLGVIWGSETTYYNSALKSRLTIIKDNSKSQVFLKMNSLQTDDTAIYYCAKHYYYGGSYAMDYWGQGTSVTVSS

SEQ ID NO: 411 - protein, 245 aa, synthetic construct
  REGION 1..245: note = source = /note="Description of Artificial Sequence: Synthetic polypeptide"
DIQMTQTTSSLSASLGDRVTISCRASQDISKYLNWYQQKPDGTVKLLIYHTSRLHSGVPSRFSGSGSGTDYSLTISNLEQEDIATYFCQQGNTLPYTFGGGTKLEITGSTSGSGKPGSGEGSTKGEVKLQESGPGLVAPSQSLSVTCTVSGVSLPDYGVSWIRQPPRKGLEWLGVIWGSETTYYNSALKSRLTIIKDNSKSQVFLKMNSLQTDDTAIYYCAKHYYYGGSYAMDYWGQGTSVTVSS

SEQ ID NO: 412 - protein, 489 aa, synthetic construct
  REGION 1..489: note = source = /note="Description of Artificial Sequence: Synthetic polypeptide"
MLLLVTSLLLCELPHPAFLLIPDIQMTQTTSSLSASLGDRVTISCRASQDISKYLNWYQQKPDGTVKLLIYHTSRLHSGVPSRFSGSGSGTDYSLTISNLEQEDIATYFCQQGNTLPYTFGGGTKLEITGSTSGSGKPGSGEGSTKGEVKLQESGPGLVAPSQSLSVTCTVSGVSLPDYGVSWIRQPPRKGLEWLGVIWGSETTYYNSALKSRLTIIKDNSKSQVFLKMNSLQTDDTAIYYCAKHYYYGGSYAMDYWGQGTSVTVSSAAAIEVMYPPPYLDNEKSNGTIIHVKGKHLCPSPLFPGPSKPFWVLVVVGGVLACYSLLVTVAFIIFWVRSKRSRLLHSDYMFMTPRRPGPTRKHYQPYAPPRDFAAYRSRVKFSRSADAPAYQQGQNQLYNELNLGRREEYDVLDKRRGRDPEMGGKPRRKNPQEGLYNELQKDKMAEAYSEIGMKGERRRGKGHDGLYQGLSTATKDTYDALHMQALPPR

SEQ ID NO: 413 - protein, 489 aa, synthetic construct
  REGION 1..489: note = source = /note="Description of Artificial Sequence: Synthetic polypeptide"
MLLLVTSLLLCELPHPAFLLIPDIQMTQTTSSLSASLGDRVTISCRASQDISKYLNWYQQKPDGTVKLLIYHTSRLHSGVPSRFSGSGSGTDYSLTISNLEQEDIATYFCQQGNTLPYTFGGGTKLEITGSTSGSGKPGSGEGSTKGEVKLQESGPGLVAPSQSLSVTCTVSGVSLPDYGVSWIRQPPRKGLEWLGVIWGSETTYYNSALKSRLTIIKDNSKSQVFLKMNSLQTDDTAIYYCAKHYYYGGSYAMDYWGQGTSVTVSSAAAIEVMYPPPYLDNEKSNGTIIHVKGKHLCPSPLFPGPSKPFWVLVVVGGVLACYSLLVTVAFIIFWVRSKRSRLLHSDFMNMTPRRPGPTRKHYQPYAPPRDFAAYRSRVKFSRSADAPAYQQGQNQLYNELNLGRREEYDVLDKRRGRDPEMGGKPRRKNPQEGLYNELQKDKMAEAYSEIGMKGERRRGKGHDGLYQGLSTATKDTYDALHMQALPPR

SEQ ID NO: 414 - protein, 489 aa, synthetic construct
  REGION 1..489: note = source = /note="Description of Artificial Sequence: Synthetic polypeptide"
MLLLVTSLLLCELPHPAFLLIPDIQMTQTTSSLSASLGDRVTISCRASQDISKYLNWYQQKPDGTVKLLIYHTSRLHSGVPSRFSGSGSGTDYSLTISNLEQEDIATYFCQQGNTLPYTFGGGTKLEITGSTSGSGKPGSGEGSTKGEVKLQESGPGLVAPSQSLSVTCTVSGVSLPDYGVSWIRQPPRKGLEWLGVIWGSETTYYNSALKSRLTIIKDNSKSQVFLKMNSLQTDDTAIYYCAKHYYYGGSYAMDYWGQGTSVTVSSAAAIEVMYPPPYLDNEKSNGTIIHVKGKHLCPSPLFPGPSKPFWVLVVVGGVLACYSLLVTVAFIIFWVRSKRSRLLHSDFMFMTPRRPGPTRKHYQPYAPPRDFAAYRSRVKFSRSADAPAYQQGQNQLYNELNLGRREEYDVLDKRRGRDPEMGGKPRRKNPQEGLYNELQKDKMAEAYSEIGMKGERRRGKGHDGLYQGLSTATKDTYDALHMQALPPR

SEQ ID NO: 415 - protein, 109 aa, synthetic construct
  REGION 1..109: note = source = /note="Description of Artificial Sequence: Synthetic polypeptide"
ELVLTQSPKFMSTSVGDRVSVTCKASQNVGTNVAWYQQKPGQSPKPLIYSATYRNSGVPDRFTGSGSGTDFTLTITNVQSKDLADYFCQYNRYPYTSFFFTKLEIKRRS

SEQ ID NO: 416 - protein, 119 aa, synthetic construct
  REGION 1..119: note = source = /note="Description of Artificial Sequence: Synthetic polypeptide"
QVQLLESGAELVRPGSSVKISCKASGYAFSSYWMNWVKQRPGQGLEWIGQIYPGDGDTNYNGKFKGQATLTADKSSSTAYMQLSGLTSEDSAVYSCARKTISSVVDFYFDYWGQGTTVT

SEQ ID NO: 417 - protein, 244 aa, synthetic construct
  REGION 1..244: note = source = /note="Description of Artificial Sequence: Synthetic polypeptide"
QVQLLESGAELVRPGSSVKISCKASGYAFSSYWMNWVKQRPGQGLEWIGQIYPGDGDTNYNGKFKGQATLTADKSSSTAYMQLSGLTSEDSAVYSCARKTISSVVDFYFDYWGQGTTVTGGGSGGGSGGGSGGGSELVLTQSPKFMSTSVGDRVSVTCKASQNVGTNVAWYQQKPGQSPKPLIYSATYRNSGVPDRFTGSGSGTDFTLTITNVQSKDLADYFCQYNRYPYTSFFFTKLEIKRRS

SEQ ID NO: 418 - protein, 464 aa, synthetic construct
  REGION 1..464: note = source = /note="Description of Artificial Sequence: Synthetic polypeptide"
QVQLLESGAELVRPGSSVKISCKASGYAFSSYWMNWVKQRPGQGLEWIGQIYPGDGDTNYNGKFKGQATLTADKSSSTAYMQLSGLTSEDSAVYSCARKTISSVVDFYFDYWGQGTTVTGGGSGGGSGGGSGGGSELVLTQSPKFMSTSVGDRVSVTCKASQNVGTNVAWYQQKPGQSPKPLIYSATYRNSGVPDRFTGSGSGTDFTLTITNVQSKDLADYFCQYNRYPYTSFFFTKLEIKRRSKIEVMYPPPYLDNEKSNGTIIHVKGKHLCPSPLFPGPSKPFWVLVVVGGVLACYSLLVTVAFIIFWVRSKRSRLLHSDYMFMTPRRPGPTRKHYQPYAPPRDFAAYRSRVKFSRSADAPAYQQGQNQLYNELNLGRREEYDVLDKRRGRDPEMGGKPRRKNPQEGLYNELQKDKMAEAYSEIGMKGERRRGKGHDGLYQGLSTATKDTYDALHMQALPPR

SEQ ID NO: 419 - protein, 464 aa, synthetic construct
  REGION 1..464: note = source = /note="Description of Artificial Sequence: Synthetic polypeptide"
QVQLLESGAELVRPGSSVKISCKASGYAFSSYWMNWVKQRPGQGLEWIGQIYPGDGDTNYNGKFKGQATLTADKSSSTAYMQLSGLTSEDSAVYSCARKTISSVVDFYFDYWGQGTTVTGGGSGGGSGGGSGGGSELVLTQSPKFMSTSVGDRVSVTCKASQNVGTNVAWYQQKPGQSPKPLIYSATYRNSGVPDRFTGSGSGTDFTLTITNVQSKDLADYFCQYNRYPYTSFFFTKLEIKRRSKIEVMYPPPYLDNEKSNGTIIHVKGKHLCPSPLFPGPSKPFWVLVVVGGVLACYSLLVTVAFIIFWVRSKRSRLLHSDFMNMTPRRPGPTRKHYQPYAPPRDFAAYRSRVKFSRSADAPAYQQGQNQLYNELNLGRREEYDVLDKRRGRDPEMGGKPRRKNPQEGLYNELQKDKMAEAYSEIGMKGERRRGKGHDGLYQGLSTATKDTYDALHMQALPPR

SEQ ID NO: 420 - protein, 464 aa, synthetic construct
  REGION 1..464: note = source = /note="Description of Artificial Sequence: Synthetic polypeptide"
QVQLLESGAELVRPGSSVKISCKASGYAFSSYWMNWVKQRPGQGLEWIGQIYPGDGDTNYNGKFKGQATLTADKSSSTAYMQLSGLTSEDSAVYSCARKTISSVVDFYFDYWGQGTTVTGGGSGGGSGGGSGGGSELVLTQSPKFMSTSVGDRVSVTCKASQNVGTNVAWYQQKPGQSPKPLIYSATYRNSGVPDRFTGSGSGTDFTLTITNVQSKDLADYFCQYNRYPYTSFFFTKLEIKRRSKIEVMYPPPYLDNEKSNGTIIHVKGKHLCPSPLFPGPSKPFWVLVVVGGVLACYSLLVTVAFIIFWVRSKRSRLLHSDFMFMTPRRPGPTRKHYQPYAPPRDFAAYRSRVKFSRSADAPAYQQGQNQLYNELNLGRREEYDVLDKRRGRDPEMGGKPRRKNPQEGLYNELQKDKMAEAYSEIGMKGERRRGKGHDGLYQGLSTATKDTYDALHMQALPPR

SEQ ID NO: 421 - protein, 107 aa, synthetic construct; identical to SEQ ID NO: 409
  REGION 1..107: note = source = /note="Description of Artificial Sequence: Synthetic polypeptide"

SEQ ID NO: 422 - protein, 121 aa, synthetic construct
  REGION 1..121: note = source = /note="Description of Artificial Sequence: Synthetic polypeptide"
EVKLQESGPGLVAPSQSLSVTCTVSGVSLPDYGVSWIRQPPRKGLEWLGVIWGSETTYYNSALKSRLTIIKDNSKSQVFLKMNSLQTDDTAIYYCAKHYYYGGSYAMDYWGQGTSVTVSSE

SEQ ID NO: 423 - protein, 246 aa, synthetic construct
  REGION 1..246: note = source = /note="Description of Artificial Sequence: Synthetic polypeptide"
DIQMTQTTSSLSASLGDRVTISCRASQDISKYLNWYQQKPDGTVKLLIYHTSRLHSGVPSRFSGSGSGTDYSLTISNLEQEDIATYFCQQGNTLPYTFGGGTKLEITGSTSGSGKPGSGEGSTKGEVKLQESGPGLVAPSQSLSVTCTVSGVSLPDYGVSWIRQPPRKGLEWLGVIWGSETTYYNSALKSRLTIIKDNSKSQVFLKMNSLQTDDTAIYYCAKHYYYGGSYAMDYWGQGTSVTVSSE

SEQ ID NO: 424 - protein, 111 aa, synthetic construct
  REGION 1..111: note = source = /note="Description of Artificial Sequence: Synthetic polypeptide"
DIVLTQSPPSLAMSLGKRATISCRASESVTILGSHLIHWYQQKPGQPPTLLIQLASNVQTGVPARFSGSGSRTDFTLTIDPVEEDDVAVYYCLQSRTIPRTFGGGTKLEIK

SEQ ID NO: 425 - protein, 117 aa, synthetic construct
  REGION 1..117: note = source = /note="Description of Artificial Sequence: Synthetic polypeptide"
QIQLVQSGPELKKPGETVKISCKASGYTFTDYSINWVKRAPGKGLKWMGWINTETREPAYAYDFRGRFAFSLETSASTAYLQINNLKYEDTATYFCALDYSYAMDYWGQGTSVTVSS

SEQ ID NO: 426 - protein, 246 aa, synthetic construct
  REGION 1..246: note = source = /note="Description of Artificial Sequence: Synthetic polypeptide"
DIVLTQSPPSLAMSLGKRATISCRASESVTILGSHLIHWYQQKPGQPPTLLIQLASNVQTGVPARFSGSGSRTDFTLTIDPVEEDDVAVYYCLQSRTIPRTFGGGTKLEIKGSTSGSGKPGSGEGSTKGQIQLVQSGPELKKPGETVKISCKASGYTFTDYSINWVKRAPGKGLKWMGWINTETREPAYAYDFRGRFAFSLETSASTAYLQINNLKYEDTATYFCALDYSYAMDYWGQGTSVTVSS

SEQ ID NO: 427 - protein, 41 aa, synthetic construct
  MOD_RES 12: note = Any amino acid
  MOD_RES 14: note = Any amino acid
  REGION 1..41: note = source = /note="Description of Artificial Sequence: Synthetic polypeptide"
RSKRSRLLHSDXMXMTPRRPGPTRKHYQPYAPPRDFAAYRS

SEQ ID NO: 428 - protein, 41 aa, synthetic construct
  REGION 1..41: note = source = /note="Description of Artificial Sequence: Synthetic polypeptide"
RSKRSRLLHSDYMFMTPRRPGPTRKHYQPYAPPRDFAAYRS

SEQ ID NO: 429 - protein, 41 aa, synthetic construct
  REGION 1..41: note = source = /note="Description of Artificial Sequence: Synthetic polypeptide"
RSKRSRLLHSDFMNMTPRRPGPTRKHYQPYAPPRDFAAYRS

SEQ ID NO: 430 - protein, 41 aa, synthetic construct
  REGION 1..41: note = source = /note="Description of Artificial Sequence: Synthetic polypeptide"
RSKRSRLLHSDFMFMTPRRPGPTRKHYQPYAPPRDFAAYRS

SEQ ID NO: 431 - protein, 244 aa, synthetic construct
  REGION 1..244: note = source = /note="Description of Artificial Sequence: Synthetic polypeptide"
QVQLQQSGAEVKKPGASVKVSCKASGYTFTGYYMHWVRQAPGQGLEWMGRINPNSGGTNYAQKFQGRVTMTRDTSISTAYMELSRLRSEDTAVYYCARGRYYGMDVWGQGTMVTVSSGGGGSGGGGSGGGGSGGGGSEIVLTQSPATLSLSPGERATISCRASQSVSSNFAWYQQRPGQAPRLLIYDASNRATGIPPRFSGSGSGTDFTLTISSLEPEDFAAYYCHQRSNWLYTFGQGTKVDIK

SEQ ID NO: 432 - protein, 488 aa, synthetic construct
  REGION 1..488: note = source = /note="Description of Artificial Sequence: Synthetic polypeptide"
MALPVTALLLPLALLLHAARPQVQLQQSGAEVKKPGASVKVSCKASGYTFTGYYMHWVRQAPGQGLEWMGRINPNSGGTNYAQKFQGRVTMTRDTSISTAYMELSRLRSEDTAVYYCARGRYYGMDVWGQGTMVTVSSGGGGSGGGGSGGGGSGGGGSEIVLTQSPATLSLSPGERATISCRASQSVSSNFAWYQQRPGQAPRLLIYDASNRATGIPPRFSGSGSGTDFTLTISSLEPEDFAAYYCHQRSNWLYTFGQGTKVDIKTTTPAPRPPTPAPTIASQPLSLRPEACRPAAGGAVHTRGLDFACDIYIWAPLAGTCGVLLLSLVITLYCKRGRKKLLYIFKQPFMRPVQTTQEEDGCSCRFPEEEEGGCELRVKFSRSADAPAYKQGQNQLYNELNLGRREEYDVLDKRRGRDPEMGGKPRRKNPQEGLYNELQKDKMAEAYSEIGMKGERRRGKGHDGLYQGLSTATKDTYDALHMQALPPR

SEQ ID NO: 433 - protein, 253 aa, synthetic construct
  REGION 1..253: note = source = /note="Description of Artificial Sequence: Synthetic polypeptide"
QVQLVQSGAEVKKPGASVKVSCKASGYTFTGYYMHWVRQAPGQGLEWMGWINPNSGGTNYAQKFQGRVTMTRDTSISTAYMELSRLRSDDTAVYYCARDLRRTVVTPRAYYGMDVWGQGTTVTVSSGGGGSGGGGSGGGGSGGGGSDIQLTQSPSTLSASVGDRVTITCQASQDISNSLNWYQQKAGKAPKLLIYDASTLETGVPSRFSGSGSGTDFSFTISSLQPEDIATYYCQQHDNLPLTFGQGTKVEIK

SEQ ID NO: 434 - protein, 497 aa, synthetic construct
  REGION 1..497: note = source = /note="Description of Artificial Sequence: Synthetic polypeptide"
MALPVTALLLPLALLLHAARPQVQLVQSGAEVKKPGASVKVSCKASGYTFTGYYMHWVRQAPGQGLEWMGWINPNSGGTNYAQKFQGRVTMTRDTSISTAYMELSRLRSDDTAVYYCARDLRRTVVTPRAYYGMDVWGQGTTVTVSSGGGGSGGGGSGGGGSGGGGSDIQLTQSPSTLSASVGDRVTITCQASQDISNSLNWYQQKAGKAPKLLIYDASTLETGVPSRFSGSGSGTDFSFTISSLQPEDIATYYCQQHDNLPLTFGQGTKVEIKTTTPAPRPPTPAPTIASQPLSLRPEACRPAAGGAVHTRGLDFACDIYIWAPLAGTCGVLLLSLVITLYCKRGRKKLLYIFKQPFMRPVQTTQEEDGCSCRFPEEEEGGCELRVKFSRSADAPAYKQGQNQLYNELNLGRREEYDVLDKRRGRDPEMGGKPRRKNPQEGLYNELQKDKMAEAYSEIGMKGERRRGKGHDGLYQGLSTATKDTYDALHMQALPPR

SEQ ID NO: 435 - protein, 246 aa, synthetic construct
  REGION 1..246: note = source = /note="Description of Artificial Sequence: Synthetic polypeptide"
QVQLVQSGAEVKKPGAPVKVSCKASGYTFTGYYMHWVRQAPGQGLEWMGWINPNSGGTNYAQKFQGRVTMTRDTSISTAYMELSRLRSDDTAVYYCARGEWDGSYYYDYWGQGTLVTVSSGGGGSGGGGSGGGGSGGGGSDIVLTQTPSSLSASVGDRVTITCRASQSINTYLNWYQHKPGKAPKLLIYAASSLQSGVPSRFSGSGSGTDFTLTISSLQPEDFATYYCQQSFSPLTFGGGTKLEIK

SEQ ID NO: 436 - protein, 490 aa, synthetic construct
  REGION 1..490: note = source = /note="Description of Artificial Sequence: Synthetic polypeptide"
MALPVTALLLPLALLLHAARPQVQLVQSGAEVKKPGAPVKVSCKASGYTFTGYYMHWVRQAPGQGLEWMGWINPNSGGTNYAQKFQGRVTMTRDTSISTAYMELSRLRSDDTAVYYCARGEWDGSYYYDYWGQGTLVTVSSGGGGSGGGGSGGGGSGGGGSDIVLTQTPSSLSASVGDRVTITCRASQSINTYLNWYQHKPGKAPKLLIYAASSLQSGVPSRFSGSGSGTDFTLTISSLQPEDFATYYCQQSFSPLTFGGGTKLEIKTTTPAPRPPTPAPTIASQPLSLRPEACRPAAGGAVHTRGLDFACDIYIWAPLAGTCGVLLLSLVITLYCKRGRKKLLYIFKQPFMRPVQTTQEEDGCSCRFPEEEEGGCELRVKFSRSADAPAYKQGQNQLYNELNLGRREEYDVLDKRRGRDPEMGGKPRRKNPQEGLYNELQKDKMAEAYSEIGMKGERRRGKGHDGLYQGLSTATKDTYDALHMQALPPR

SEQ ID NO: 437 - protein, 242 aa, synthetic construct
  REGION 1..242: note = source = /note="Description of Artificial Sequence: Synthetic polypeptide"
QVQLVESGGGLVQPGGSLRLSCAASGFTFSSYWMHWVRQVPGKGLVWVSRINTDGSTTTYADSVEGRFTISRDNAKNTLYLQMNSLRDDDTAVYYCVGGHWAVWGQGTTVTVSSGGGGSGGGGSGGGGSGGGGSDIQMTQSPSTLSASVGDRVTITCRASQSISDRLAWYQQKPGKAPKLLIYKASSLESGVPSRFSGSGSGTEFTLTISSLQPDDFAVYYCQQYGHLPMYTFGQGTKVEIK

SEQ ID NO: 438 - protein, 486 aa, synthetic construct
  REGION 1..486: note = source = /note="Description of Artificial Sequence: Synthetic polypeptide"
MALPVTALLLPLALLLHAARPQVQLVESGGGLVQPGGSLRLSCAASGFTFSSYWMHWVRQVPGKGLVWVSRINTDGSTTTYADSVEGRFTISRDNAKNTLYLQMNSLRDDDTAVYYCVGGHWAVWGQGTTVTVSSGGGGSGGGGSGGGGSGGGGSDIQMTQSPSTLSASVGDRVTITCRASQSISDRLAWYQQKPGKAPKLLIYKASSLESGVPSRFSGSGSGTEFTLTISSLQPDDFAVYYCQQYGHLPMYTFGQGTKVEIKTTTPAPRPPTPAPTIASQPLSLRPEACRPAAGGAVHTRGLDFACDIYIWAPLAGTCGVLLLSLVITLYCKRGRKKLLYIFKQPFMRPVQTTQEEDGCSCRFPEEEEGGCELRVKFSRSADAPAYKQGQNQLYNELNLGRREEYDVLDKRRGRDPEMGGKPRRKNPQEGLYNELQKDKMAEAYSEIGMKGERRRGKGHDGLYQGLSTATKDTYDALHMQALPPR

SEQ ID NO: 439 - protein, 241 aa, synthetic construct
  REGION 1..241: note = source = /note="Description of Artificial Sequence: Synthetic polypeptide"
QVQLVQSGAEVEKPGASVKVSCKASGYTFTDYYMHWVRQAPGQGLEWMGWINPNSGGTNYAQKFQGRVTMTRDTSISTAYMELSRLRSDDTAVYYCASGWDFDYWGQGTLVTVSSGGGGSGGGGSGGGGSGGGGSDIVMTQSPSSLSASVGDRVTITCRASQSIRYYLSWYQQKPGKAPKLLIYTASILQNGVPSRFSGSGSGTDFTLTISSLQPEDFATYYCLQTYTTPDFGPGTKVEIK

SEQ ID NO: 440 - protein, 485 aa, synthetic construct
  REGION 1..485: note = source = /note="Description of Artificial Sequence: Synthetic polypeptide"
MALPVTALLLPLALLLHAARPQVQLVQSGAEVEKPGASVKVSCKASGYTFTDYYMHWVRQAPGQGLEWMGWINPNSGGTNYAQKFQGRVTMTRDTSISTAYMELSRLRSDDTAVYYCASGWDFDYWGQGTLVTVSSGGGGSGGGGSGGGGSGGGGSDIVMTQSPSSLSASVGDRVTITCRASQSIRYYLSWYQQKPGKAPKLLIYTASILQNGVPSRFSGSGSGTDFTLTISSLQPEDFATYYCLQTYTTPDFGPGTKVEIKTTTPAPRPPTPAPTIASQPLSLRPEACRPAAGGAVHTRGLDFACDIYIWAPLAGTCGVLLLSLVITLYCKRGRKKLLYIFKQPFMRPVQTTQEEDGCSCRFPEEEEGGCELRVKFSRSADAPAYKQGQNQLYNELNLGRREEYDVLDKRRGRDPEMGGKPRRKNPQEGLYNELQKDKMAEAYSEIGMKGERRRGKGHDGLYQGLSTATKDTYDALHMQALPPR

SEQ ID NO: 441 - protein, 253 aa, synthetic construct
  REGION 1..253: note = source = /note="Description of Artificial Sequence: Synthetic polypeptide"
QVQLVQSGAEVKKPGASVKVSCKASGYTFTSYYMHWVRQAPGQGLEWMGIINPSGGSTSYAQKFQGRVTMTRDTSTSTVYMELSSLRSEDTAVYYCARYRLIAVAGDYYYYGMDVWGQGTMVTVSSGGGGSGGGGSGGGGSGGGGSDIQMTQSPSSVSASVGDRVTITCRASQGVGRWLAWYQQKPGTAPKLLIYAASTLQSGVPSRFSGSGSGTDFTLTINNLQPEDFATYYCQQANSFPLTFGGGTRLEIK

SEQ ID NO: 442 - protein, 497 aa, synthetic construct
  REGION 1..497: note = source = /note="Description of Artificial Sequence: Synthetic polypeptide"
MALPVTALLLPLALLLHAARPQVQLVQSGAEVKKPGASVKVSCKASGYTFTSYYMHWVRQAPGQGLEWMGIINPSGGSTSYAQKFQGRVTMTRDTSTSTVYMELSSLRSEDTAVYYCARYRLIAVAGDYYYYGMDVWGQGTMVTVSSGGGGSGGGGSGGGGSGGGGSDIQMTQSPSSVSASVGDRVTITCRASQGVGRWLAWYQQKPGTAPKLLIYAASTLQSGVPSRFSGSGSGTDFTLTINNLQPEDFATYYCQQANSFPLTFGGGTRLEIKTTTPAPRPPTPAPTIASQPLSLRPEACRPAAGGAVHTRGLDFACDIYIWAPLAGTCGVLLLSLVITLYCKRGRKKLLYIFKQPFMRPVQTTQEEDGCSCRFPEEEEGGCELRVKFSRSADAPAYKQGQNQLYNELNLGRREEYDVLDKRRGRDPEMGGKPRRKNPQEGLYNELQKDKMAEAYSEIGMKGERRRGKGHDGLYQGLSTATKDTYDALHMQALPPR

SEQ ID NO: 443 - protein, 250 aa, synthetic construct
  REGION 1..250: note = source = /note="Description of Artificial Sequence: Synthetic polypeptide"
QVQLVQSGGGVVQPGRSLRLSCAASGFTFSSYAMHWVRQAPGKGLEWVAVISYDGSNKYYADSVKGRFTISRDNSKNTLYLQMNSLRAEDTAVYYCARWKVSSSSPAFDYWGQGTLVTVSSGGGGSGGGGSGGGGSGGGGSEIVLTQSPATLSLSPGERAILSCRASQSVYTKYLGWYQQKPGQAPRLLIYDASTRATGIPDRFSGSGSGTDFTLTINRLEPEDFAVYYCQHYGGSPLITFGQGTRLEIK

SEQ ID NO: 444 - protein, 494 aa, synthetic construct
  REGION 1..494: note = source = /note="Description of Artificial Sequence: Synthetic polypeptide"
MALPVTALLLPLALLLHAARPQVQLVQSGGGVVQPGRSLRLSCAASGFTFSSYAMHWVRQAPGKGLEWVAVISYDGSNKYYADSVKGRFTISRDNSKNTLYLQMNSLRAEDTAVYYCARWKVSSSSPAFDYWGQGTLVTVSSGGGGSGGGGSGGGGSGGGGSEIVLTQSPATLSLSPGERAILSCRASQSVYTKYLGWYQQKPGQAPRLLIYDASTRATGIPDRFSGSGSGTDFTLTINRLEPEDFAVYYCQHYGGSPLITFGQGTRLEIKTTTPAPRPPTPAPTIASQPLSLRPEACRPAAGGAVHTRGLDFACDIYIWAPLAGTCGVLLLSLVITLYCKRGRKKLLYIFKQPFMRPVQTTQEEDGCSCRFPEEEEGGCELRVKFSRSADAPAYKQGQNQLYNELNLGRREEYDVLDKRRGRDPEMGGKPRRKNPQEGLYNELQKDKMAEAYSEIGMKGERRRGKGHDGLYQGLSTATKDTYDALHMQALPPR

SEQ ID NO: 445 - protein, 246 aa, synthetic construct
  REGION 1..246: note = source = /note="Description of Artificial Sequence: Synthetic polypeptide"
QVQLQQSGAEVKKPGASVKVSCKTSGYPFTGYSLHWVRQAPGQGLEWMGWINPNSGGTNYAQKFQGRVTMTRDTSISTAYMELSRLRSDDTAVYYCARDHYGGNSLFYWGQGTLVTVSSGGGGSGGGGSGGGGSGGGGSDIQLTQSPSSISASVGDTVSITCRASQDSGTWLAWYQQKPGKAPNLLMYDASTLEDGVPSRFSGSASGTEFTLTVNRLQPEDSATYYCQQYNSYPLTFGGGTKVDIK

SEQ ID NO: 446 - protein, 490 aa, synthetic construct
  REGION 1..490: note = source = /note="Description of Artificial Sequence: Synthetic polypeptide"
MALPVTALLLPLALLLHAARPQVQLQQSGAEVKKPGASVKVSCKTSGYPFTGYSLHWVRQAPGQGLEWMGWINPNSGGTNYAQKFQGRVTMTRDTSISTAYMELSRLRSDDTAVYYCARDHYGGNSLFYWGQGTLVTVSSGGGGSGGGGSGGGGSGGGGSDIQLTQSPSSISASVGDTVSITCRASQDSGTWLAWYQQKPGKAPNLLMYDASTLEDGVPSRFSGSASGTEFTLTVNRLQPEDSATYYCQQYNSYPLTFGGGTKVDIKTTTPAPRPPTPAPTIASQPLSLRPEACRPAAGGAVHTRGLDFACDIYIWAPLAGTCGVLLLSLVITLYCKRGRKKLLYIFKQPFMRPVQTTQEEDGCSCRFPEEEEGGCELRVKFSRSADAPAYKQGQNQLYNELNLGRREEYDVLDKRRGRDPEMGGKPRRKNPQEGLYNELQKDKMAEAYSEIGMKGERRRGKGHDGLYQGLSTATKDTYDALHMQALPPR

SEQ ID NO: 447 - protein, 248 aa, synthetic construct
  REGION 1..248: note = source = /note="Description of Artificial Sequence: Synthetic polypeptide"
QVQLVQSGAEVKKPGASVEVSCKASGYTFTSYYMHWVRQAPGQGLEWMGIINPSGGSTGYAQKFQGRVTMTRDTSTSTVHMELSSLRSEDTAVYYCARGGYSSSSDAFDIWGQGTMVTVSSGGGGSGGGGSGGGGSGGGGSDIQMTQSPPSLSASVGDRVTITCRASQDISSALAWYQQKPGTPPKLLIYDASSLESGVPSRFSGSGSGTDFTLTISSLQPEDFATYYCQQFSSYPLTFGGGTRLEIK

SEQ ID NO: 448 - protein, 492 aa, synthetic construct
  REGION 1..492: note = source = /note="Description of Artificial Sequence: Synthetic polypeptide"
MALPVTALLLPLALLLHAARPQVQLVQSGAEVKKPGASVEVSCKASGYTFTSYYMHWVRQAPGQGLEWMGIINPSGGSTGYAQKFQGRVTMTRDTSTSTVHMELSSLRSEDTAVYYCARGGYSSSSDAFDIWGQGTMVTVSSGGGGSGGGGSGGGGSGGGGSDIQMTQSPPSLSASVGDRVTITCRASQDISSALAWYQQKPGTPPKLLIYDASSLESGVPSRFSGSGSGTDFTLTISSLQPEDFATYYCQQFSSYPLTFGGGTRLEIKTTTPAPRPPTPAPTIASQPLSLRPEACRPAAGGAVHTRGLDFACDIYIWAPLAGTCGVLLLSLVITLYCKRGRKKLLYIFKQPFMRPVQTTQEEDGCSCRFPEEEEGGCELRVKFSRSADAPAYKQGQNQLYNELNLGRREEYDVLDKRRGRDPEMGGKPRRKNPQEGLYNELQKDKMAEAYSEIGMKGERRRGKGHDGLYQGLSTATKDTYDALHMQALPPR

SEQ ID NO: 449 - protein, 255 aa, synthetic construct
  REGION 1..255: note = source = /note="Description of Artificial Sequence: Synthetic polypeptide"
QVQLVQSGAEVKKPGASVKVSCKASGYTFTSYGISWVRQAPGQGLEWMGWISAYNGNTNYAQKLQGRVTMTTDTSTSTAYMELRSLRSDDTAVYYCARVAGGIYYYYGMDVWGQGTTITVSSGGGGSGGGGSGGGGSGGGGSDIVMTQTPDSLAVSLGERATISCKSSHSVLYNRNNKNYLAWYQQKPGQPPKLLFYWASTRKSGVPDRFSGSGSGTDFTLTISSLQPEDFATYFCQQTQTFPLTFGQGTRLEIN

SEQ ID NO: 450 - protein, 499 aa, synthetic construct
  REGION 1..499: note = source = /note="Description of Artificial Sequence: Synthetic polypeptide"
MALPVTALLLPLALLLHAARPQVQLVQSGAEVKKPGASVKVSCKASGYTFTSYGISWVRQAPGQGLEWMGWISAYNGNTNYAQKLQGRVTMTTDTSTSTAYMELRSLRSDDTAVYYCARVAGGIYYYYGMDVWGQGTTITVSSGGGGSGGGGSGGGGSGGGGSDIVMTQTPDSLAVSLGERATISCKSSHSVLYNRNNKNYLAWYQQKPGQPPKLLFYWASTRKSGVPDRFSGSGSGTDFTLTISSLQPEDFATYFCQQTQTFPLTFGQGTRLEINTTTPAPRPPTPAPTIASQPLSLRPEACRPAAGGAVHTRGLDFACDIYIWAPLAGTCGVLLLSLVITLYCKRGRKKLLYIFKQPFMRPVQTTQEEDGCSCRFPEEEEGGCELRVKFSRSADAPAYKQGQNQLYNELNLGRREEYDVLDKRRGRDPEMGGKPRRKNPQEGLYNELQKDKMAEAYSEIGMKGERRRGKGHDGLYQGLSTATKDTYDALHMQALPPR

SEQ ID NO: 451 - protein, 241 aa, synthetic construct
  REGION 1..241: note = source = /note="Description of Artificial Sequence: Synthetic polypeptide"
QVQLQQSGAEVKKPGASVKVSCKASGYTFTGYYMHWVRQAPGQGLEWMGWINPNSGGTNYAQNFQGRVTMTRDTSISTAYMELRRLRSDDTAVYYCASGWDFDYWGQGTLVTVSSGGGGSGGGGSGGGGSGGGGSDIRMTQSPSSLSASVGDRVTITCRASQSIRYYLSWYQQKPGKAPKLLIYTASILQNGVPSRFSGSGSGTDFTLTISSLQPEDFATYYCLQTYTTPDFGPGTKVEIK

SEQ ID NO: 452 - protein, 485 aa, synthetic construct
  REGION 1..485: note = source = /note="Description of Artificial Sequence: Synthetic polypeptide"
MALPVTALLLPLALLLHAARPQVQLQQSGAEVKKPGASVKVSCKASGYTFTGYYMHWVRQAPGQGLEWMGWINPNSGGTNYAQNFQGRVTMTRDTSISTAYMELRRLRSDDTAVYYCASGWDFDYWGQGTLVTVSSGGGGSGGGGSGGGGSGGGGSDIRMTQSPSSLSASVGDRVTITCRASQSIRYYLSWYQQKPGKAPKLLIYTASILQNGVPSRFSGSGSGTDFTLTISSLQPEDFATYYCLQTYTTPDFGPGTKVEIKTTTPAPRPPTPAPTIASQPLSLRPEACRPAAGGAVHTRGLDFACDIYIWAPLAGTCGVLLLSLVITLYCKRGRKKLLYIFKQPFMRPVQTTQEEDGCSCRFPEEEEGGCELRVKFSRSADAPAYKQGQNQLYNELNLGRREEYDVLDKRRGRDPEMGGKPRRKNPQEGLYNELQKDKMAEAYSEIGMKGERRRGKGHDGLYQGLSTATKDTYDALHMQALPPR

SEQ ID NO: 453 - protein, 246 aa, synthetic construct
  REGION 1..246: note = source = /note="Description of Artificial Sequence: Synthetic polypeptide"
QVQLVQSGAEVKKPGASVKVSCKASGYTFTGYYMHWVRQAPGQGLEWMGRINPNSGGTNYAQKFQGRVTMTTDTSTSTAYMELRSLRSDDTAVYYCARTTTSYAFDIWGQGTMVTVSSGGGGSGGGGSGGGGSGGGGSDIQLTQSPSTLSASVGDRVTITCRASQSISTWLAWYQQKPGKAPNLLIYKASTLESGVPSRFSGSGSGTEFTLTISSLQPDDFATYYCQQYNTYSPYTFGQGTKLEIK

SEQ ID NO: 454 - protein, 490 aa, synthetic construct
  REGION 1..490: note = source = /note="Description of Artificial Sequence: Synthetic polypeptide"
MALPVTALLLPLALLLHAARPQVQLVQSGAEVKKPGASVKVSCKASGYTFTGYYMHWVRQAPGQGLEWMGRINPNSGGTNYAQKFQGRVTMTTDTSTSTAYMELRSLRSDDTAVYYCARTTTSYAFDIWGQGTMVTVSSGGGGSGGGGSGGGGSGGGGSDIQLTQSPSTLSASVGDRVTITCRASQSISTWLAWYQQKPGKAPNLLIYKASTLESGVPSRFSGSGSGTEFTLTISSLQPDDFATYYCQQYNTYSPYTFGQGTKLEIKTTTPAPRPPTPAPTIASQPLSLRPEACRPAAGGAVHTRGLDFACDIYIWAPLAGTCGVLLLSLVITLYCKRGRKKLLYIFKQPFMRPVQTTQEEDGCSCRFPEEEEGGCELRVKFSRSADAPAYKQGQNQLYNELNLGRREEYDVLDKRRGRDPEMGGKPRRKNPQEGLYNELQKDKMAEAYSEIGMKGERRRGKGHDGLYQGLSTATKDTYDALHMQALPPR

SEQ ID NO: 455 - protein, 249 aa, synthetic construct
  REGION 1..249: note = source = /note="Description of Artificial Sequence: Synthetic polypeptide"
QVQLVQSGGGLVKPGGSLRLSCEASGFIFSDYYMGWIRQAPGKGLEWVSYIGRSGSSMYYADSVKGRFTFSRDNAKNSLYLQMNSLRAEDTAVYYCAASPVVAATEDFQHWGQGTLVTVSSGGGGSGGGGSGGGGSGGGGSDIVMTQTPATLSLSPGERATLSCRASQSVTSNYLAWYQQKPGQAPRLLLFGASTRATGIPDRFSGSGSGTDFTLTINRLEPEDFAMYYCQQYGSAPVTFGQGTKLEIK

SEQ ID NO: 456 - protein, 493 aa, synthetic construct
  REGION 1..493: note = source = /note="Description of Artificial Sequence: Synthetic polypeptide"
MALPVTALLLPLALLLHAARPQVQLVQSGGGLVKPGGSLRLSCEASGFIFSDYYMGWIRQAPGKGLEWVSYIGRSGSSMYYADSVKGRFTFSRDNAKNSLYLQMNSLRAEDTAVYYCAASPVVAATEDFQHWGQGTLVTVSSGGGGSGGGGSGGGGSGGGGSDIVMTQTPATLSLSPGERATLSCRASQSVTSNYLAWYQQKPGQAPRLLLFGASTRATGIPDRFSGSGSGTDFTLTINRLEPEDFAMYYCQQYGSAPVTFGQGTKLEIKTTTPAPRPPTPAPTIASQPLSLRPEACRPAAGGAVHTRGLDFACDIYIWAPLAGTCGVLLLSLVITLYCKRGRKKLLYIFKQPFMRPVQTTQEEDGCSCRFPEEEEGGCELRVKFSRSADAPAYKQGQNQLYNELNLGRREEYDVLDKRRGRDPEMGGKPRRKNPQEGLYNELQKDKMAEAYSEIGMKGERRRGKGHDGLYQGLSTATKDTYDALHMQALPPR

SEQ ID NO: 457 - protein, 249 aa, synthetic construct
  REGION 1..249: note = source = /note="Description of Artificial Sequence: Synthetic polypeptide"
QVQLVQSGAEVRAPGASVKISCKASGFTFRGYYIHWVRQAPGQGLEWMGIINPSGGSRAYAQKFQGRVTMTRDTSTSTVYMELSSLRSDDTAMYYCARTASCGGDCYYLDYWGQGTLVTVSSGGGGSGGGGSGGGGSGGGGSDIQMTQSPPTLSASVGDRVTITCRASENVNIWLAWYQQKPGKAPKLLIYKSSSLASGVPSRFSGSGSGAEFTLTISSLQPDDFATYYCQQYQSYPLTFGGGTKVDIK

SEQ ID NO: 458 - protein, 493 aa, synthetic construct
  REGION 1..493: note = source = /note="Description of Artificial Sequence: Synthetic polypeptide"
MALPVTALLLPLALLLHAARPQVQLVQSGAEVRAPGASVKISCKASGFTFRGYYIHWVRQAPGQGLEWMGIINPSGGSRAYAQKFQGRVTMTRDTSTSTVYMELSSLRSDDTAMYYCARTASCGGDCYYLDYWGQGTLVTVSSGGGGSGGGGSGGGGSGGGGSDIQMTQSPPTLSASVGDRVTITCRASENVNIWLAWYQQKPGKAPKLLIYKSSSLASGVPSRFSGSGSGAEFTLTISSLQPDDFATYYCQQYQSYPLTFGGGTKVDIKTTTPAPRPPTPAPTIASQPLSLRPEACRPAAGGAVHTRGLDFACDIYIWAPLAGTCGVLLLSLVITLYCKRGRKKLLYIFKQPFMRPVQTTQEEDGCSCRFPEEEEGGCELRVKFSRSADAPAYKQGQNQLYNELNLGRREEYDVLDKRRGRDPEMGGKPRRKNPQEGLYNELQKDKMAEAYSEIGMKGERRRGKGHDGLYQGLSTATKDTYDALHMQALPPR

SEQ ID NO: 459 - protein, 244 aa, synthetic construct
  REGION 1..244: note = source = /note="Description of Artificial Sequence: Synthetic polypeptide"
QVQLVQSGGGLVQPGRSLRLSCAASGFTFDDYAMHWVRQAPGKGLEWVSGISWNSGSIGYADSVKGRFTISRDNAKNSLYLQMNSLRAEDTAVYYCAKDGSSSWSWGYFDYWGQGTLVTVSSGGGGSGGGGSGGGGSSSELTQDPAVSVALGQTVRTTCQGDALRSYYASWYQQKPGQAPMLVIYGKNNRPSGIPDRFSGSDSGDTASLTITGAQAEDEADYYCNSRDSSGYPVFGTGTKVTVL

SEQ ID NO: 460 - protein, 488 aa, synthetic construct
  REGION 1..488: note = source = /note="Description of Artificial Sequence: Synthetic polypeptide"
MALPVTALLLPLALLLHAARPQVQLVQSGGGLVQPGRSLRLSCAASGFTFDDYAMHWVRQAPGKGLEWVSGISWNSGSIGYADSVKGRFTISRDNAKNSLYLQMNSLRAEDTAVYYCAKDGSSSWSWGYFDYWGQGTLVTVSSGGGGSGGGGSGGGGSSSELTQDPAVSVALGQTVRTTCQGDALRSYYASWYQQKPGQAPMLVIYGKNNRPSGIPDRFSGSDSGDTASLTITGAQAEDEADYYCNSRDSSGYPVFGTGTKVTVLTTTPAPRPPTPAPTIASQPLSLRPEACRPAAGGAVHTRGLDFACDIYIWAPLAGTCGVLLLSLVITLYCKRGRKKLLYIFKQPFMRPVQTTQEEDGCSCRFPEEEEGGCELRVKFSRSADAPAYKQGQNQLYNELNLGRREEYDVLDKRRGRDPEMGGKPRRKNPQEGLYNELQKDKMAEAYSEIGMKGERRRGKGHDGLYQGLSTATKDTYDALHMQALPPR

SEQ ID NO: 461 - protein, 246 aa, synthetic construct
  REGION 1..246: note = source = /note="Description of Artificial Sequence: Synthetic polypeptide"
EVQLVESGGGLVQPGRSLRLSCAASGFTFDDYAMHWVRQAPGKGLEWVSGISWNSGSTGYADSVKGRFTISRDNAKNSLYLQMNSLRAEDTALYYCAKDSSSWYGGGSAFDIWGQGTMVTVSSGGGGSGGGGSGGGGSSSELTQEPAVSVALGQTVRITCQGDSLRSYYASWYQQKPGQAPVLVIFGRSRRPSGIPDRFSGSSSGNTASLIITGAQAEDEADYYCNSRDNTANHYVFGTGTKLTVL

SEQ ID NO: 462 - protein, 490 aa, synthetic construct
  REGION 1..490: note = source = /note="Description of Artificial Sequence: Synthetic polypeptide"
MALPVTALLLPLALLLHAARPEVQLVESGGGLVQPGRSLRLSCAASGFTFDDYAMHWVRQAPGKGLEWVSGISWNSGSTGYADSVKGRFTISRDNAKNSLYLQMNSLRAEDTALYYCAKDSSSWYGGGSAFDIWGQGTMVTVSSGGGGSGGGGSGGGGSSSELTQEPAVSVALGQTVRITCQGDSLRSYYASWYQQKPGQAPVLVIFGRSRRPSGIPDRFSGSSSGNTASLIITGAQAEDEADYYCNSRDNTANHYVFGTGTKLTVLTTTPAPRPPTPAPTIASQPLSLRPEACRPAAGGAVHTRGLDFACDIYIWAPLAGTCGVLLLSLVITLYCKRGRKKLLYIFKQPFMRPVQTTQEEDGCSCRFPEEEEGGCELRVKFSRSADAPAYKQGQNQLYNELNLGRREEYDVLDKRRGRDPEMGGKPRRKNPQEGLYNELQKDKMAEAYSEIGMKGERRRGKGHDGLYQGLSTATKDTYDALHMQALPPR

SEQ ID NO: 463 - protein, 246 aa, synthetic construct
  REGION 1..246: note = source = /note="Description of Artificial Sequence: Synthetic polypeptide"
EVQLVESGGGLVQPGRSLRLSCAASGFTFDDYAMHWVRQAPGKGLEWVSGISWNSGSTGYADSVKGRFTISRDNAKNSLYLQMNSLRAEDTALYYCAKDSSSWYGGGSAFDIWGQGTMVTVSSGGGGSGGGGSGGGGSSSELTQDPAVSVALGQTVRITCQGDSLRSYYASWYQQKPGQAPVLVIYGKNNRPSGIPDRFSGSSSGNTASLTITGAQAEDEADYYCNSRGSSGNHYVFGTGTKVTVL

SEQ ID NO: 464 - protein, 490 aa, synthetic construct
  REGION 1..490: note = source = /note="Description of Artificial Sequence: Synthetic polypeptide"
MALPVTALLLPLALLLHAARPEVQLVESGGGLVQPGRSLRLSCAASGFTFDDYAMHWVRQAPGKGLEWVSGISWNSGSTGYADSVKGRFTISRDNAKNSLYLQMNSLRAEDTALYYCAKDSSSWYGGGSAFDIWGQGTMVTVSSGGGGSGGGGSGGGGSSSELTQDPAVSVALGQTVRITCQGDSLRSYYASWYQQKPGQAPVLVIYGKNNRPSGIPDRFSGSSSGNTASLTITGAQAEDEADYYCNSRGSSGNHYVFGTGTKVTVLTTTPAPRPPTPAPTIASQPLSLRPEACRPAAGGAVHTRGLDFACDIYIWAPLAGTCGVLLLSLVITLYCKRGRKKLLYIFKQPFMRPVQTTQEEDGCSCRFPEEEEGGCELRVKFSRSADAPAYKQGQNQLYNELNLGRREEYDVLDKRRGRDPEMGGKPRRKNPQEGLYNELQKDKMAEAYSEIGMKGERRRGKGHDGLYQGLSTATKDTYDALHMQALPPR

SEQ ID NO: 465 - protein, 251 aa, synthetic construct
  REGION 1..251: note = source = /note="Description of Artificial Sequence: Synthetic polypeptide"
QVQLVQSGGGLVQPGGSLRLSCAASGFTFSSYWMHWVRQAPGKGLVWVSRINSDGSSTSYADSVKGRFTISRDNAKNTLYLQMNSLRAEDTAVYYCVRTGWVGSYYYYMDVWGKGTTVTVSSGGGGSGGGGSGGGGSGGGGSEIVLTQSPGTLSLSPGERATLSCRASQSVSSNYLAWYQQKPGQPPRLLIYDVSTRATGIPARFSGGGSGTDFTLTISSLEPEDFAVYYCQQRSNWPPWTFGQGTKVEIK

SEQ ID NO: 466 - protein, 495 aa, synthetic construct
  REGION 1..495: note = source = /note="Description of Artificial Sequence: Synthetic polypeptide"
MALPVTALLLPLALLLHAARPQVQLVQSGGGLVQPGGSLRLSCAASGFTFSSYWMHWVRQAPGKGLVWVSRINSDGSSTSYADSVKGRFTISRDNAKNTLYLQMNSLRAEDTAVYYCVRTGWVGSYYYYMDVWGKGTTVTVSSGGGGSGGGGSGGGGSGGGGSEIVLTQSPGTLSLSPGERATLSCRASQSVSSNYLAWYQQKPGQPPRLLIYDVSTRATGIPARFSGGGSGTDFTLTISSLEPEDFAVYYCQQRSNWPPWTFGQGTKVEIKTTTPAPRPPTPAPTIASQPLSLRPEACRPAAGGAVHTRGLDFACDIYIWAPLAGTCGVLLLSLVITLYCKRGRKKLLYIFKQPFMRPVQTTQEEDGCSCRFPEEEEGGCELRVKFSRSADAPAYKQGQNQLYNELNLGRREEYDVLDKRRGRDPEMGGKPRRKNPQEGLYNELQKDKMAEAYSEIGMKGERRRGKGHDGLYQGLSTATKDTYDALHMQALPPR

SEQ ID NO: 467 - protein, 250 aa, synthetic construct
  REGION 1..250: note = source = /note="Description of Artificial Sequence: Synthetic polypeptide"
QVQLVQSGGGVVQPGRSLRLSCAASGFTFSSYGMHWVRQAPGKGLEWVAVISYDGSNKYYADSVKGRFTISRDNSKNTLYLQMNSLRAEDTAVYYCAKGYSRYYYYGMDVWGQGTTVTVSSGGGGSGGGGSGGGGSGGGGSEIVMTQSPATLSLSPGERAILSCRASQSVYTKYLGWYQQKPGQAPRLLIYDASTRATGIPDRFSGSGSGTDFTLTINRLEPEDFAVYYCQHYGGSPLITFGQGTKVDIK

SEQ ID NO: 468 - protein, 494 aa, synthetic construct
  REGION 1..494: note = source = /note="Description of Artificial Sequence: Synthetic polypeptide"
MALPVTALLLPLALLLHAARPQVQLVQSGGGVVQPGRSLRLSCAASGFTFSSYGMHWVRQAPGKGLEWVAVISYDGSNKYYADSVKGRFTISRDNSKNTLYLQMNSLRAEDTAVYYCAKGYSRYYYYGMDVWGQGTTVTVSSGGGGSGGGGSGGGGSGGGGSEIVMTQSPATLSLSPGERAILSCRASQSVYTKYLGWYQQKPGQAPRLLIYDASTRATGIPDRFSGSGSGTDFTLTINRLEPEDFAVYYCQHYGGSPLITFGQGTKVDIKTTTPAPRPPTPAPTIASQPLSLRPEACRPAAGGAVHTRGLDFACDIYIWAPLAGTCGVLLLSLVITLYCKRGRKKLLYIFKQPFMRPVQTTQEEDGCSCRFPEEEEGGCELRVKFSRSADAPAYKQGQNQLYNELNLGRREEYDVLDKRRGRDPEMGGKPRRKNPQEGLYNELQKDKMAEAYSEIGMKGERRRGKGHDGLYQGLSTATKDTYDALHMQALPPR

SEQ ID NO: 469 - protein, 249 aa, synthetic construct
  REGION 1..249: note = source = /note="Description of Artificial Sequence: Synthetic polypeptide"
QVQLVQSGGGLVQPGGSLRLSCAASGFTFSSYAMSWVRQAPGKGLEWVSAISGSGGSTYYADSVKGRFTISRDNSKNTLYLQMNSLRAEDTAVYYCAKREAAAGHDWYFDLWGRGTLVTVSSGGGGSGGGGSGGGGSGGGGSDIRVTQSPSSLSASVGDRVTITCRASQSISSYLNWYQQKPGKAPKLLIYAASSLQSGVPSRFSGSGSGTDFTLTISSLQPEDFATYYCQQSYSIPLTFGQGTKVEIK

SEQ ID NO: 470 - protein, 493 aa, synthetic construct
  REGION 1..493: note = source = /note="Description of Artificial Sequence: Synthetic polypeptide"
MALPVTALLLPLALLLHAARPQVQLVQSGGGLVQPGGSLRLSCAASGFTFSSYAMSWVRQAPGKGLEWVSAISGSGGSTYYADSVKGRFTISRDNSKNTLYLQMNSLRAEDTAVYYCAKREAAAGHDWYFDLWGRGTLVTVSSGGGGSGGGGSGGGGSGGGGSDIRVTQSPSSLSASVGDRVTITCRASQSISSYLNWYQQKPGKAPKLLIYAASSLQSGVPSRFSGSGSGTDFTLTISSLQPEDFATYYCQQSYSIPLTFGQGTKVEIKTTTPAPRPPTPAPTIASQPLSLRPEACRPAAGGAVHTRGLDFACDIYIWAPLAGTCGVLLLSLVITLYCKRGRKKLLYIFKQPFMRPVQTTQEEDGCSCRFPEEEEGGCELRVKFSRSADAPAYKQGQNQLYNELNLGRREEYDVLDKRRGRDPEMGGKPRRKNPQEGLYNELQKDKMAEAYSEIGMKGERRRGKGHDGLYQGLSTATKDTYDALHMQALPPR

SEQ ID NO: 471 - protein, 239 aa, synthetic construct
  REGION 1..239: note = source = /note="Description of Artificial Sequence: Synthetic polypeptide"
QVQLQQSGPELEKPGASVKISCKASGYSFTGYTMNWVKQSHGKSLEWIGLITPYNGASSYNQKFRGKATLTVDKSSSTAYMDLLSLTSEDSAVYFCARGGYDGRGFDYWGQGTTVTVSSGGGGSGGGGSGGGGSDIELTQSPAIMSASPGEKVTMTCSASSSVSYMHWYQQKSGTSPKRWIYDTSKLASGVPGRFSGSGSGNSYSLTISSVEAEDDATYYCQQWSGYPLTFGAGTKLEI

SEQ ID NO: 472 - protein, 383 aa, synthetic construct
  REGION 1..383: note = source = /note="Description of Artificial Sequence: Synthetic polypeptide"
MALPVTALLLPLALLLHAARPQVQLQQSGPELEKPGASVKISCKASGYSFTGYTMNWVKQSHGKSLEWIGLITPYNGASSYNQKFRGKATLTVDKSSSTAYMDLLSLTSEDSAVYFCARGGYDGRGFDYWGQGTTVTVSSGGGGSGGGGSGGGGSDIELTQSPAIMSASPGEKVTMTCSASSSVSYMHWYQQKSGTSPKRWIYDTSKLASGVPGRFSGSGSGNSYSLTISSVEAEDDATYYCQQWSGYPLTFGAGTKLEITTTPAPRPPTPAPTIASQPLSLRPEACRPAAGGAVHTRGLDFACDIYIWAPLAGTCGVLLLSLVITLYCKRGRKKLLYIFKQPFMRPVQTTQEEDGCSCRFPEEEEGGCELRVKFSRSADAPA

SEQ ID NO: 473 - DNA, 732 bp, synthetic construct
  misc_feature 1..732: note = source = /note="Description of Artificial Sequence: Synthetic polynucleotide"
  source 1..732: mol_type = other DNA
caagtccaactgcagcagtcaggagcggaagtgaagaaaccaggagcgtcagtcaaagtgtcgtgcaaggctagcggctacaccttcaccggctactacatgcactgggttcgacaggctccagggcagggtctggagtggatgggccgcatcaacccgaattccggtgggactaactacgcccagaagttccagggaagagtgaccatgactagggacacgtcgatcagcactgcgtacatggaactgagccgcctgcggtccgaggatactgccgtctactactgcgcacgcggaaggtactatggaatggacgtgtggggccaagggactatggtgactgtgagctcgggagggggaggctccggtggcgggggatcaggaggaggaggatcagggggaggaggttccgaaattgtcctcacccagagcccggcaaccctctcactttccccgggagagcgcgcaaccatctcttgccgggctagccaatccgtgtcgtccaatttcgcctggtaccagcaacggccgggacaagcccctagactcctgatctacgacgccagcaacagagcgactggaattcctccacgcttttcgggatcaggctccggtaccgacttcaccctgactatctcgtcgctcgaacccgaggatttcgccgcctactactgtcatcagcggtcgaactggttgtatacgtttggccagggcaccaaggtggatatcaag

SEQ ID NO: 474 - DNA, 1464 bp, synthetic construct
  misc_feature 1..1464: note = source = /note="Description of Artificial Sequence: Synthetic polynucleotide"
  source 1..1464: mol_type = other DNA
atggccctccctgtcaccgccctgctgcttccgctggctcttctgctccacgccgctcggccccaagtccaactgcagcagtcaggagcggaagtgaagaaaccaggagcgtcagtcaaagtgtcgtgcaaggctagcggctacaccttcaccggctactacatgcactgggttcgacaggctccagggcagggtctggagtggatgggccgcatcaacccgaattccggtgggactaactacgcccagaagttccagggaagagtgaccatgactagggacacgtcgatcagcactgcgtacatggaactgagccgcctgcggtccgaggatactgccgtctactactgcgcacgcggaaggtactatggaatggacgtgtggggccaagggactatggtgactgtgagctcgggagggggaggctccggtggcgggggatcaggaggaggaggatcagggggaggaggttccgaaattgtcctcacccagagcccggcaaccctctcactttccccgggagagcgcgcaaccatctcttgccgggctagccaatccgtgtcgtccaatttcgcctggtaccagcaacggccgggacaagcccctagactcctgatctacgacgccagcaacagagcgactggaattcctccacgcttttcgggatcaggctccggtaccgacttcaccctgactatctcgtcgctcgaacccgaggatttcgccgcctactactgtcatcagcggtcgaactggttgtatacgtttggccagggcaccaaggtggatatcaagaccactaccccagcaccgaggccacccaccccggctcctaccatcgcctcccagcctctgtccctgcgtccggaggcatgtagacccgcagctggtggggccgtgcatacccggggtcttgacttcgcctgcgatatctacatttgggcccctctggctggtacttgcggggtcctgctgctttcactcgtgatcactctttactgtaagcgcggtcggaagaagctgctgtacatctttaagcaacccttcatgaggcctgtgcagactactcaagaggaggacggctgttcatgccggttcccagaggaggaggaaggcggctgcgaactgcgcgtgaaattcagccgcagcgcagatgctccagcctacaagcaggggcagaaccagctctacaacgaactcaatcttggtcggagagaggagtacgacgtgctggacaagcggagaggacgggacccagaaatgggcgggaagccgcgcagaaagaatccccaagagggcctgtacaacgagctccaaaaggataagatggcagaagcctatagcgagattggtatgaaaggggaacgcagaagaggcaaaggccacgacggactgtaccagggactcagcaccgccaccaaggacacctatgacgctcttcacatgcaggccctgccgcctcgg

SEQ ID NO: 475 - DNA, 759 bp, synthetic construct
  misc_feature 1..759: note = source = /note="Description of Artificial Sequence: Synthetic polynucleotide"
  source 1..759: mol_type = other DNA
caagtccaactcgtccagtcaggagcagaagtcaagaaaccaggtgctagcgtgaaagtgtcgtgcaaggcgtcgggatacactttcaccggatactacatgcactgggtccgccaggcccccggacaaggactggaatggatgggctggatcaacccgaatagcgggggaactaattacgcccagaagtttcagggacgagtgaccatgacccgcgatacctctatctcgaccgcctacatggagctctccagactgcgctccgacgatactgcagtgtactactgcgcccgggacctgaggcggactgtggttactcctcgcgcctattatggcatggacgtgtggggccaaggaactactgtgactgtgagctcgggaggcggtgggtcaggcggaggagggtcgggcggtggtggctcgggagggggaggaagcgacattcaacttacgcagagcccgtcaaccctgtcagcgtcagtgggagatcgggtgaccatcacgtgtcaggccagccaggatatctccaactcgctcaactggtaccagcaaaaggcgggtaaagctccgaagctgctgatctacgacgcttccaccctcgagactggagtcccatccagattttccgggtcaggaagcggcaccgatttctccttcaccatttcgtccttgcaaccggaggacatcgcaacctactactgccagcagcatgacaacttgcctctgacgttcgggcagggcaccaaggtggaaatcaag

SEQ ID NO: 476 - DNA, 1491 bp, synthetic construct
  misc_feature 1..1491: note = source = /note="Description of Artificial Sequence: Synthetic polynucleotide"
  source 1..1491: mol_type = other DNA
atggccctccctgtcaccgccctgctgcttccgctggctcttctgctccacgccgctcggccccaagtccaactcgtccagtcaggagcagaagtcaagaaaccaggtgctagcgtgaaagtgtcgtgcaaggcgtcgggatacactttcaccggatactacatgcactgggtccgccaggcccccggacaaggactggaatggatgggctggatcaacccgaatagcgggggaactaattacgcccagaagtttcagggacgagtgaccatgacccgcgatacctctatctcgaccgcctacatggagctctccagactgcgctccgacgatactgcagtgtactactgcgcccgggacctgaggcggactgtggttactcctcgcgcctattatggcatggacgtgtggggccaaggaactactgtgactgtgagctcgggaggcggtgggtcaggcggaggagggtcgggcggtggtggctcgggagggggaggaagcgacattcaacttacgcagagcccgtcaaccctgtcagcgtcagtgggagatcgggtgaccatcacgtgtcaggccagccaggatatctccaactcgctcaactggtaccagcaaaaggcgggtaaagctccgaagctgctgatctacgacgcttccaccctcgagactggagtcccatccagattttccgggtcaggaagcggcaccgatttctccttcaccatttcgtccttgcaaccggaggacatcgcaacctactactgccagcagcatgacaacttgcctctgacgttcgggcagggcaccaaggtggaaatcaagaccactaccccagcaccgaggccacccaccccggctcctaccatcgcctcccagcctctgtccctgcgtccggaggcatgtagacccgcagctggtggggccgtgcatacccggggtcttgacttcgcctgcgatatctacatttgggcccctctggctggtacttgcggggtcctgctgctttcactcgtgatcactctttactgtaagcgcggtcggaagaagctgctgtacatctttaagcaacccttcatgaggcctgtgcagactactcaagaggaggacggctgttcatgccggttcccagaggaggaggaaggcggctgcgaactgcgcgtgaaattcagccgcagcgcagatgctccagcctacaagcaggggcagaaccagctctacaacgaactcaatcttggtcggagagaggagtacgacgtgctggacaagcggagaggacgggacccagaaatgggcgggaagccgcgcagaaagaatccccaagagggcctgtacaacgagctccaaaaggataagatggcagaagcctatagcgagattggtatgaaaggggaacgcagaagaggcaaaggccacgacggactgtaccagggactcagcaccgccaccaaggacacctatgacgctcttcacatgcaggccctgccgcctcgg

SEQ ID NO: 477 - DNA, 738 bp, synthetic construct
  misc_feature 1..738: note = source = /note="Description of Artificial Sequence: Synthetic polynucleotide"
  source 1..738: mol_type = other DNA
caagtccaactcgtccaatcaggagcggaagtcaaaaagcccggagctccagtgaaagtgtcatgcaaggcctccggctacaccttcaccggttactatatgcactgggtgcggcaggccccgggccaggggttggaatggatgggatggatcaatccaaactcgggtgggactaactacgcccagaagttccaaggacgggtgaccatgactagggacacctcgatctccaccgcatacatggagcttagcagactccgctccgacgataccgcagtctactattgcgcgcggggagagtgggacggatcgtactactacgattactggggccagggaactctggtgactgtttcctcgggtggaggaggttcaggcggaggcggctcgggcgggggaggatctggaggaggagggtccgacattgtgctgacccaaactccttcgtccctgtcggccagcgtgggcgaccgcgtgacgattacgtgcagagctagccaatccatcaatacttacctcaactggtaccagcataagccggggaaagcaccaaagctgctgatctacgccgcctcatccttgcagagcggtgtgccttcacgctttagcggatcgggatcgggaacggatttcaccctgactatcagctccctccagccggaggattttgcgacctactactgtcagcagagcttctcaccgctgactttcggcggcgggaccaagctggaaatcaag

SEQ ID NO: 478 - DNA, 1470 bp, synthetic construct
  misc_feature 1..1470: note = source = /note="Description of Artificial Sequence: Synthetic polynucleotide"
  source 1..1470: mol_type = other DNA
atggccctccctgtcaccgccctgctgcttccgctggctcttctgctccacgccgctcggccccaagtccaactcgtccaatcaggagcggaagtcaaaaagcccggagctccagtgaaagtgtcatgcaaggcctccggctacaccttcaccggttactatatgcactgggtgcggcaggccccgggccaggggttggaatggatgggatggatcaatccaaactcgggtgggactaactacgcccagaagttccaaggacgggtgaccatgactagggacacctcgatctccaccgcatacatggagcttagcagactccgctccgacgataccgcagtctactattgcgcgcggggagagtgggacggatcgtactactacgattactggggccagggaactctggtgactgtttcctcgggtggaggaggttcaggcggaggcggctcgggcgggggaggatctggaggaggagggtccgacattgtgctgacccaaactccttcgtccctgtcggccagcgtgggcgaccgcgtgacgattacgtgcagagctagccaatccatcaatacttacctcaactggtaccagcataagccggggaaagcaccaaagctgctgatctacgccgcctcatccttgcagagcggtgtgccttcacgctttagcggatcgggatcgggaacggatttcaccctgactatcagctccctccagccggaggattttgcgacctactactgtcagcagagcttctcaccgctgactttcggcggcgggaccaagctggaaatcaagaccactaccccagcaccgaggccacccaccccggctcctaccatcgcctcccagcctctgtccctgcgtccggaggcatgtagacccgcagctggtggggccgtgcatacccggggtcttgacttcgcctgcgatatctacatttgggcccctctggctggtacttgcggggtcctgctgctttcactcgtgatcactctttactgtaagcgcggtcggaagaagctgctgtacatctttaagcaacccttcatgaggcctgtgcagactactcaagaggaggacggctgttcatgccggttcccagaggaggaggaaggcggctgcgaactgcgcgtgaaattcagccgcagcgcagatgctccagcctacaagcaggggcagaaccagctctacaacgaactcaatcttggtcggagagaggagtacgacgtgctggacaagcggagaggacgggacccagaaatgggcgggaagccgcgcagaaagaatccccaagagggcctgtacaacgagctccaaaaggataagatggcagaagcctatagcgagattggtatgaaaggggaacgcagaagaggcaaaggccacgacggactgtaccagggactcagcaccgccaccaaggacacctatgacgctcttcacatgcaggccctgccgcctcgg

SEQ ID NO: 479 - DNA, 726 bp, synthetic construct
  misc_feature 1..726: note = source = /note="Description of Artificial Sequence: Synthetic polynucleotide"
  source 1..726: mol_type = other DNA
caagtgcaactcgttgaatcaggtggaggtttggtgcaacccggaggatctctcagactgtcgtgtgcggcgtccgggttcaccttttcgtcctactggatgcactgggtgcgccaggtgccgggaaaaggactggtgtgggtgtccagaatcaacaccgacgggtcaacgactacctacgcagatagcgtggaaggtcggttcaccatttcgcgggacaacgctaaaaacactctgtaccttcagatgaattcactgcgcgatgacgacaccgcagtctactactgcgtcggtggacactgggcggtctggggacagggaactacggtgactgtgtccagcggcgggggaggaagcggcggaggggggagcggaggcggaggatcaggaggaggcggctccgatatccagatgacccagtcgccatcgaccctctccgctagcgtgggggatagggtcactatcacttgccgagccagccaatccattagcgaccggcttgcctggtaccaacagaaacctggaaaggccccgaagctgctcatctacaaggcctcgtcactggagtcgggagtcccgtcccgcttttccggctcgggctcaggcaccgagttcactctgaccatctcgagcctgcagccggacgatttcgccgtgtattactgccagcaatacggacatctcccaatgtacacgttcggtcagggcaccaaggtcgaaatcaag

SEQ ID NO: 480 - DNA, 1458 bp, synthetic construct
  misc_feature 1..1458: note = source = /note="Description of Artificial Sequence: Synthetic polynucleotide"
  source 1..1458: mol_type = other DNA
atggccctccctgtcaccgccctgctgcttccgctggctcttctgctccacgccgctcggccccaagtgcaactcgttgaatcaggtggaggtttggtgcaacccggaggatctctcagactgtcgtgtgcggcgtccgggttcaccttttcgtcctactggatgcactgggtgcgccaggtgccgggaaaaggactggtgtgggtgtccagaatcaacaccgacgggtcaacgactacctacgcagatagcgtggaaggtcggttcaccatttcgcgggacaacgctaaaaacactctgtaccttcagatgaattcactgcgcgatgacgacaccgcagtctactactgcgtcggtggacactgggcggtctggggacagggaactacggtgactgtgtccagcggcgggggaggaagcggcggaggggggagcggaggcggaggatcaggaggaggcggctccgatatccagatgacccagtcgccatcgaccctctccgctagcgtgggggatagggtcactatcacttgccgagccagccaatccattagcgaccggcttgcctggtaccaacagaaacctggaaaggccccgaagctgctcatctacaaggcctcgtcactggagtcgggagtcccgtcccgcttttccggctcgggctcaggcaccgagttcactctgaccatctcgagcctgcagccggacgatttcgccgtgtattactgccagcaatacggacatctcccaatgtacacgttcggtcagggcaccaaggtcgaaatcaagaccactaccccagcaccgaggccacccaccccggctcctaccatcgcctcccagcctctgtccctgcgtccggaggcatgtagacccgcagctggtggggccgtgcatacccggggtcttgacttcgcctgcgatatctacatttgggcccctctggctggtacttgcggggtcctgctgctttcactcgtgatcactctttactgtaagcgcggtcggaagaagctgctgtacatctttaagcaacccttcatgaggcctgtgcagactactcaagaggaggacggctgttcatgccggttcccagaggaggaggaaggcggctgcgaactgcgcgtgaaattcagccgcagcgcagatgctccagcctacaagcaggggcagaaccagctctacaacgaactcaatcttggtcggagagaggagtacgacgtgctggacaagcggagaggacgggacccagaaatgggcgggaagccgcgcagaaagaatccccaagagggcctgtacaacgagctccaaaaggataagatggcagaagcctatagcgagattggtatgaaaggggaacgcagaagaggcaaaggccacgacggactgtaccagggactcagcaccgccaccaaggacacctatgacgctcttcacatgcaggccctgccgcctcgg

SEQ ID NO: 481 - DNA, 723 bp, synthetic construct
  misc_feature 1..723: note = source = /note="Description of Artificial Sequence: Synthetic polynucleotide"
  source 1..723: mol_type = other DNA
caagtccaactcgttcaatcaggcgcagaagtcgaaaagcccggagcatcagtcaaagtctcttgcaaggcttccggctacaccttcacggactactacatgcactgggtgcgccaggctccaggccagggactggagtggatgggatggatcaacccgaattccgggggaactaactacgcccagaagtttcagggccgggtgactatgactcgcgatacctcgatctcgactgcgtacatggagctcagccgcctccggtcggacgataccgccgtgtactattgtgcgtcgggatgggacttcgactactgggggcagggcactctggtcactgtgtcaagcggaggaggtggatcaggtggaggtggaagcgggggaggaggttccggcggcggaggatcagatatcgtgatgacgcaatcgccttcctcgttgtccgcatccgtgggagacagggtgaccattacttgcagagcgtcccagtccattcggtactacctgtcgtggtaccagcagaagccggggaaagccccaaaactgcttatctatactgcctcgatcctccaaaacggcgtgccatcaagattcagcggttcgggcagcgggaccgactttaccctgactatcagcagcctgcagccggaagatttcgccacgtactactgcctgcaaacctacaccaccccggacttcggacctggaaccaaggtggagatcaag

SEQ ID NO: 482 - DNA, 1455 bp, synthetic construct
  misc_feature 1..1455: note = source = /note="Description of Artificial Sequence: Synthetic polynucleotide"
  source 1..1455: mol_type = other DNA
atggccctccctgtcaccgccctgctgcttccgctggctcttctgctccacgccgctcggccccaagtccaactcgttcaatcaggcgcagaagtcgaaaagcccggagcatcagtcaaagtctcttgcaaggcttccggctacaccttcacggactactacatgcactgggtgcgccaggctccaggccagggactggagtggatgggatggatcaacccgaattccgggggaactaactacgcccagaagtttcagggccgggtgactatgactcgcgatacctcgatctcgactgcgtacatggagctcagccgcctccggtcggacgataccgccgtgtactattgtgcgtcgggatgggacttcgactactgggggcagggcactctggtcactgtgtcaagcggaggaggtggatcaggtggaggtggaagcgggggaggaggttccggcggcggaggatcagatatcgtgatgacgcaatcgccttcctcgttgtccgcatccgtgggagacagggtgaccattacttgcagagcgtcccagtccattcggtactacctgtcgtggtaccagcagaagccggggaaagccccaaaactgcttatctatactgcctcgatcctccaaaacggcgtgccatcaagattcagcggttcgggcagcgggaccgactttaccctgactatcagcagcctgcagccggaagatttcgccacgtactactgcctgcaaacctacaccaccccggacttcggacctggaaccaaggtggagatcaagaccactaccccagcaccgaggccacccaccccggctcctaccatcgcctcccagcctctgtccctgcgtccggaggcatgtagacccgcagctggtggggccgtgcatacccggggtcttgacttcgcctgcgatatctacatttgggcccctctggctggtacttgcggggtcctgctgctttcactcgtgatcactctttactgtaagcgcggtcggaagaagctgctgtacatctttaagcaacccttcatgaggcctgtgcagactactcaagaggaggacggctgttcatgccggttcccagaggaggaggaaggcggctgcgaactgcgcgtgaaattcagccgcagcgcagatgctccagcctacaagcaggggcagaaccagctctacaacgaactcaatcttggtcggagagaggagtacgacgtgctggacaagcggagaggacgggacccagaaatgggcgggaagccgcgcagaaagaatccccaagagggcctgtacaacgagctccaaaaggataagatggcagaagcctatagcgagattggtatgaaaggggaacgcagaagaggcaaaggccacgacggactgtaccagggactcagcaccgccaccaaggacacctatgacgctcttcacatgcaggccctgccgcctcgg

SEQ ID NO: 483 - DNA, 759 bp, synthetic construct
  misc_feature 1..759: note = source = /note="Description of Artificial Sequence: Synthetic polynucleotide"
  source 1..759: mol_type = other DNA
caagtgcaactcgtccagtcaggtgcagaagtgaagaaacccggagcgtcagtcaaagtgtcatgcaaggcgtcaggctacaccttcaccagctactacatgcactgggtgcggcaggccccaggccaaggcttggagtggatgggaatcattaacccgtcaggaggctccacctcctacgcccagaagtttcagggaagagtgacgatgactcgggatacgtcgacctcgaccgtgtacatggaactgagctcgctgcgctccgaggacactgctgtgtactactgcgcacggtacagactcattgccgtggcaggagactactactactatggcatggacgtctgggggcagggcactatggtcactgtgtcgtccggcggaggaggctcgggtggaggaggtagcggaggagggggaagcggaggggggggctccgatatccagatgactcagtcgccttcctccgtgtcggcctcggttggagatcgcgtcaccatcacttgtcgagcttcccaaggagtcggtaggtggctggcgtggtaccagcaaaagccgggaactgccccgaagctcctgatctacgcggctagcaccctgcagtcgggagtgccatcccgcttcagcggatctgggtcaggtaccgacttcacccttacgatcaacaatctccagccggaggactttgccacctattactgccaacaggccaacagcttccctctgactttcggagggggcactcgcctggaaatcaag

SEQ ID NO: 484 - DNA, 1491 bp, synthetic construct
  misc_feature 1..1491: note = source = /note="Description of Artificial Sequence: Synthetic polynucleotide"
  source 1..1491: mol_type = other DNA
atggccctccctgtcaccgccctgctgcttccgctggctcttctgctccacgccgctcggccccaagtgcaactcgtccagtcaggtgcagaagtgaagaaacccggagcgtcagtcaaagtgtcatgcaaggcgtcaggctacaccttcaccagctactacatgcactgggtgcggcaggccccaggccaaggcttggagtggatgggaatcattaacccgtcaggaggctccacctcctacgcccagaagtttcagggaagagtgacgatgactcgggatacgtcgacctcgaccgtgtacatggaactgagctcgctgcgctccgaggacactgctgtgtactactgcgcacggtacagactcattgccgtggcaggagactactactactatggcatggacgtctgggggcagggcactatggtcactgtgtcgtccggcggaggaggctcgggtggaggaggtagcggaggagggggaagcggaggggggggctccgatatccagatgactcagtcgccttcctccgtgtcggcctcggttggagatcgcgtcaccatcacttgtcgagcttcccaaggagtcggtaggtggctggcgtggtaccagcaaaagccgggaactgccccgaagctcctgatctacgcggctagcaccctgcagtcgggagtgccatcccgcttcagcggatctgggtcaggtaccgacttcacccttacgatcaacaatctccagccggaggactttgccacctattactgccaacaggccaacagcttccctctgactttcggagggggcactcgcctggaaatcaagaccactaccccagcaccgaggccacccaccccggctcctaccatcgcctcccagcctctgtccctgcgtccggaggcatgtagacccgcagctggtggggccgtgcatacccggggtcttgacttcgcctgcgatatctacatttgggcccctctggctggtacttgcggggtcctgctgctttcactcgtgatcactctttactgtaagcgcggtcggaagaagctgctgtacatctttaagcaacccttcatgaggcctgtgcagactactcaagaggaggacggctgttcatgccggttcccagaggaggaggaaggcggctgcgaactgcgcgtgaaattcagccgcagcgcagatgctccagcctacaagcaggggcagaaccagctctacaacgaactcaatcttggtcggagagaggagtacgacgtgctggacaagcggagaggacgggacccagaaatgggcgggaagccgcgcagaaagaatccccaagagggcctgtacaacgagctccaaaaggataagatggcagaagcctatagcgagattggtatgaaaggggaacgcagaagaggcaaaggccacgacggactgtaccagggactcagcaccgccaccaaggacacctatgacgctcttcacatgcaggccctgccgcctcgg

SEQ ID NO: 485 - DNA, 750 bp, synthetic construct
  misc_feature 1..750: note = source = /note="Description of Artificial Sequence: Synthetic polynucleotide"
  source 1..750: mol_type = other DNA
caagtgcaattggttcaatcaggaggaggagtggtgcaacctggaagatctctcagactgtcgtgtgcggcatcgggattcactttctcatcatacgcaatgcactgggtccgccaggccccgggcaaaggcttggaatgggtggcggtcatttcatacgacggctcgaacaagtactacgctgacagcgtgaagggacgctttactatttcccgggacaattcgaagaacactctgtacctccagatgaactcccttagggctgaggacaccgccgtctactactgcgcacgctggaaagtgtcgtccagctccccagcttttgactactggggacagggaacccttgtgaccgtgtcgtccggtggagggggaagcggcggagggggatcaggtggcggcggatcgggaggcgggggatcagaaatcgtgctgactcagtccccggccacgctgtctctcagcccgggagagagagcgatcctgtcctgccgcgcctcgcagagcgtgtacactaagtacctggggtggtaccagcagaaaccgggtcaagcgcctcggctgctgatctacgatgcctccacccgggccaccggaatccccgatcggttctccggcagcggctcgggaactgatttcacgctgaccatcaatcgcctggagccggaagatttcgccgtctattactgccagcattacggcgggagcccactcatcaccttcggtcaaggaacccgactcgaaatcaag

SEQ ID NO: 486 - DNA, 1482 bp, synthetic construct
  misc_feature 1..1482: note = source = /note="Description of Artificial Sequence: Synthetic polynucleotide"
  source 1..1482: mol_type = other DNA
atggccctccctgtcaccgccctgctgcttccgctggctcttctgctccacgccgctcggccccaagtgcaattggttcaatcaggaggaggagtggtgcaacctggaagatctctcagactgtcgtgtgcggcatcgggattcactttctcatcatacgcaatgcactgggtccgccaggccccgggcaaaggcttggaatgggtggcggtcatttcatacgacggctcgaacaagtactacgctgacagcgtgaagggacgctttactatttcccgggacaattcgaagaacactctgtacctccagatgaactcccttagggctgaggacaccgccgtctactactgcgcacgctggaaagtgtcgtccagctccccagcttttgactactggggacagggaacccttgtgaccgtgtcgtccggtggagggggaagcggcggagggggatcaggtggcggcggatcgggaggcgggggatcagaaatcgtgctgactcagtccccggccacgctgtctctcagcccgggagagagagcgatcctgtcctgccgcgcctcgcagagcgtgtacactaagtacctggggtggtaccagcagaaaccgggtcaagcgcctcggctgctgatctacgatgcctccacccgggccaccggaatccccgatcggttctccggcagcggctcgggaactgatttcacgctgaccatcaatcgcctggagccggaagatttcgccgtctattactgccagcattacggcgggagcccactcatcaccttcggtcaaggaacccgactcgaaatcaagaccactaccccagcaccgaggccacccaccccggctcctaccatcgcctcccagcctctgtccctgcgtccggaggcatgtagacccgcagctggtggggccgtgcatacccggggtcttgacttcgcctgcgatatctacatttgggcccctctggctggtacttgcggggtcctgctgctttcactcgtgatcactctttactgtaagcgcggtcggaagaagctgctgtacatctttaagcaacccttcatgaggcctgtgcagactactcaagaggaggacggctgttcatgccggttcccagaggaggaggaaggcggctgcgaactgcgcgtgaaattcagccgcagcgcagatgctccagcctacaagcaggggcagaaccagctctacaacgaactcaatcttggtcggagagaggagtacgacgtgctggacaagcggagaggacgggacccagaaatgggcgggaagccgcgcagaaagaatccccaagagggcctgtacaacgagctccaaaaggataagatggcagaagcctatagcgagattggtatgaaaggggaacgcagaagaggcaaaggccacgacggactgtaccagggactcagcaccgccaccaaggacacctatgacgctcttcacatgcaggccctgccgcctcgg

SEQ ID NO: 487 - DNA, 738 bp, synthetic construct
  misc_feature 1..738: note = source = /note="Description of Artificial Sequence: Synthetic polynucleotide"
  source 1..738: mol_type = other DNA
caagtccaactccagcagtcaggtgcagaagtcaaaaagccaggagcatccgtgaaggtttcgtgcaagacttccggctacccttttaccgggtactccctccattgggtgagacaagcaccgggccagggactggagtggatgggatggatcaacccaaattcgggcggcaccaactatgcgcagaagttccagggacgggtgaccatgactcgcgacacttcgatctccactgcctacatggagctgtcccgcttgagatctgacgacacggccgtctactactgcgcccgggatcactacggaggtaattcgctgttctactgggggcagggaacccttgtgactgtgtcctcgggtggtggagggtcaggaggcggaggctcagggggaggaggtagcggaggaggcggatcagacatccaactgacccagtcaccatcctccatctcggctagcgtcggagacaccgtgtcgattacttgtagggcctcccaagactcagggacgtggctggcgtggtatcagcaaaaaccgggcaaagctccgaacctgttgatgtacgacgccagcaccctcgaagatggagtgcctagccgcttcagcggaagcgcctcgggcactgaattcacgctgactgtgaatcggctccagccggaggattcggcgacctactactgccagcagtacaacagctaccccctgacctttggaggcgggaccaaggtggatatcaag

SEQ ID NO: 488 - DNA, 1470 bp, synthetic construct
  misc_feature 1..1470: note = source = /note="Description of Artificial Sequence: Synthetic polynucleotide"
  source 1..1470: mol_type = other DNA
atggccctccctgtcaccgccctgctgcttccgctggctcttctgctccacgccgctcggccccaagtccaactccagcagtcaggtgcagaagtcaaaaagccaggagcatccgtgaaggtttcgtgcaagacttccggctacccttttaccgggtactccctccattgggtgagacaagcaccgggccagggactggagtggatgggatggatcaacccaaattcgggcggcaccaactatgcgcagaagttccagggacgggtgaccatgactcgcgacacttcgatctccactgcctacatggagctgtcccgcttgagatctgacgacacggccgtctactactgcgcccgggatcactacggaggtaattcgctgttctactgggggcagggaacccttgtgactgtgtcctcgggtggtggagggtcaggaggcggaggctcagggggaggaggtagcggaggaggcggatcagacatccaactgacccagtcaccatcctccatctcggctagcgtcggagacaccgtgtcgattacttgtagggcctcccaagactcagggacgtggctggcgtggtatcagcaaaaaccgggcaaagctccgaacctgttgatgtacgacgccagcaccctcgaagatggagtgcctagccgcttcagcggaagcgcctcgggcactgaattcacgctgactgtgaatcggctccagccggaggattcggcgacctactactgccagcagtacaacagctaccccctgacctttggaggcgggaccaaggtggatatcaagaccactaccccagcaccgaggccacccaccccggctcctaccatcgcctcccagcctctgtccctgcgtccggaggcatgtagacccgcagctggtggggccgtgcatacccggggtcttgacttcgcctgcgatatctacatttgggcccctctggctggtacttgcggggtcctgctgctttcactcgtgatcactctttactgtaagcgcggtcggaagaagctgctgtacatctttaagcaacccttcatgaggcctgtgcagactactcaagaggaggacggctgttcatgccggttcccagaggaggaggaaggcggctgcgaactgcgcgtgaaattcagccgcagcgcagatgctccagcctacaagcaggggcagaaccagctctacaacgaactcaatcttggtcggagagaggagtacgacgtgctggacaagcggagaggacgggacccagaaatgggcgggaagccgcgcagaaagaatccccaagagggcctgtacaacgagctccaaaaggataagatggcagaagcctatagcgagattggtatgaaaggggaacgcagaagaggcaaaggccacgacggactgtaccagggactcagcaccgccaccaaggacacctatgacgctcttcacatgcaggccctgccgcctcgg

SEQ ID NO: 489 - DNA, 744 bp, synthetic construct
  misc_feature 1..744: note = source = /note="Description of Artificial Sequence: Synthetic polynucleotide"
  source 1..744: mol_type = other DNA
caagtgcaactcgtccagtcaggtgcagaagtgaagaaaccaggagcgtccgtcgaagtgtcgtgtaaggcgtccggctacactttcacctcgtactacatgcactgggtgcggcaggccccgggacaaggcctcgaatggatgggaatcatcaacccgagcggaggctcgactggttacgcccagaagttccagggaagggtgacgatgacccgcgatacctcgacttcgaccgttcatatggagctctcgtccctgcggagcgaggacactgctgtctactattgcgcgcggggaggatactctagctcctccgatgcatttgacatttggggccagggaactatggtgaccgtgtcatcaggcggaggtggatcaggaggaggagggtcgggagggggaggcagcggcgggggtgggtcggacattcagatgacgcagtcccctcctagcctgagcgcctcggtgggtgacagagtgaccatcacttgcagagcctcgcaagacatctcctccgcattggcttggtaccagcaaaagccgggcactccgccgaaactgctcatctacgatgcctcctcactggagtcaggagtcccatctcgcttctcggggtcaggaagcggcaccgattttacccttaccatctccagcctgcagcccgaggacttcgccacgtactactgccaacagttcagctcctacccactgaccttcgggggcggaactcgcctggaaatcaag

SEQ ID NO: 490 - DNA, 1476 bp, synthetic construct
  misc_feature 1..1476: note = source = /note="Description of Artificial Sequence: Synthetic polynucleotide"
  source 1..1476: mol_type = other DNA
atggccctccctgtcaccgccctgctgcttccgctggctcttctgctccacgccgctcggccccaagtgcaactcgtccagtcaggtgcagaagtgaagaaaccaggagcgtccgtcgaagtgtcgtgtaaggcgtccggctacactttcacctcgtactacatgcactgggtgcggcaggccccgggacaaggcctcgaatggatgggaatcatcaacccgagcggaggctcgactggttacgcccagaagttccagggaagggtgacgatgacccgcgatacctcgacttcgaccgttcatatggagctctcgtccctgcggagcgaggacactgctgtctactattgcgcgcggggaggatactctagctcctccgatgcatttgacatttggggccagggaactatggtgaccgtgtcatcaggcggaggtggatcaggaggaggagggtcgggagggggaggcagcggcgggggtgggtcggacattcagatgacgcagtcccctcctagcctgagcgcctcggtgggtgacagagtgaccatcacttgcagagcctcgcaagacatctcctccgcattggcttggtaccagcaaaagccgggcactccgccgaaactgctcatctacgatgcctcctcactggagtcaggagtcccatctcgcttctcggggtcaggaagcggcaccgattttacccttaccatctccagcctgcagcccgaggacttcgccacgtactactgccaacagttcagctcctacccactgaccttcgggggcggaactcgcctggaaatcaagaccactaccccagcaccgaggccacccaccccggctcctaccatcgcctcccagcctctgtccctgcgtccggaggcatgtagacccgcagctggtggggccgtgcatacccggggtcttgacttcgcctgcgatatctacatttgggcccctctggctggtacttgcggggtcctgctgctttcactcgtgatcactctttactgtaagcgcggtcggaagaagctgctgtacatctttaagcaacccttcatgaggcctgtgcagactactcaagaggaggacggctgttcatgccggttcccagaggaggaggaaggcggctgcgaactgcgcgtgaaattcagccgcagcgcagatgctccagcctacaagcaggggcagaaccagctctacaacgaactcaatcttggtcggagagaggagtacgacgtgctggacaagcggagaggacgggacccagaaatgggcgggaagccgcgcagaaagaatccccaagagggcctgtacaacgagctccaaaaggataagatggcagaagcctatagcgagattggtatgaaaggggaacgcagaagaggcaaaggccacgacggactgtaccagggactcagcaccgccaccaaggacacctatgacgctcttcacatgcaggccctgccgcctcgg

SEQ ID NO: 491 - DNA, 765 bp, synthetic construct
  misc_feature 1..765: note = source = /note="Description of Artificial Sequence: Synthetic polynucleotide"
  source 1..765: mol_type = other DNA
caagtgcaactcgtccagagcggagcagaagtcaagaagccaggagcgtcagtgaaagtgtcatgcaaggccagcggctatacctttacttcgtatgggatctcctgggtgcggcaggcaccgggccaaggactggagtggatgggatggatctcagcctacaacggtaacaccaactacgcccagaagctgcaaggacgcgtgaccatgactactgatacgagcacctccactgcctacatggaattgcggtcccttcggtcggacgatactgctgtgtactactgcgcaagagtcgccggagggatctactactactacggcatggacgtctggggacagggaaccaccattacggtgtcgagcggagggggaggctcggggggaggaggaagcggaggtggcggctccgggggcggcggatcggacattgtgatgacccagactcctgactccctggctgtttcgttgggagagcgcgcgactatctcgtgtaagtccagccactcagtcctgtacaatcgcaataacaagaactacctcgcgtggtaccagcaaaaaccgggtcagccgcctaaactcctgttctactgggcctccaccagaaagagcggggtgccagatcgattctctggatcaggatcaggtaccgactttacgctgaccatctcgtccctgcagccggaggatttcgcgacttacttctgccagcagactcagactttccccctcaccttcggtcaaggcaccaggctggaaatcaat

SEQ ID NO: 492 - DNA, 1497 bp, synthetic construct
  misc_feature 1..1497: note = source = /note="Description of Artificial Sequence: Synthetic polynucleotide"
  source 1..1497: mol_type = other DNA
atggccctccctgtcaccgccctgctgcttccgctggctcttctgctccacgccgctcggccccaagtgcaactcgtccagagcggagcagaagtcaagaagccaggagcgtcagtgaaagtgtcatgcaaggccagcggctatacctttacttcgtatgggatctcctgggtgcggcaggcaccgggccaaggactggagtggatgggatggatctcagcctacaacggtaacaccaactacgcccagaagctgcaaggacgcgtgaccatgactactgatacgagcacctccactgcctacatggaattgcggtcccttcggtcggacgatactgctgtgtactactgcgcaagagtcgccggagggatctactactactacggcatggacgtctggggacagggaaccaccattacggtgtcgagcggagggggaggctcggggggaggaggaagcggaggtggcggctccgggggcggcggatcggacattgtgatgacccagactcctgactccctggctgtttcgttgggagagcgcgcgactatctcgtgtaagtccagccactcagtcctgtacaatcgcaataacaagaactacctcgcgtggtaccagcaaaaaccgggtcagccgcctaaactcctgttctactgggcctccaccagaaagagcggggtgccagatcgattctctggatcaggatcaggtaccgactttacgctgaccatctcgtccctgcagccggaggatttcgcgacttacttctgccagcagactcagactttccccctcaccttcggtcaaggcaccaggctggaaatcaataccactaccccagcaccgaggccacccaccccggctcctaccatcgcctcccagcctctgtccctgcgtccggaggcatgtagacccgcagctggtggggccgtgcatacccggggtcttgacttcgcctgcgatatctacatttgggcccctctggctggtacttgcggggtcctgctgctttcactcgtgatcactctttactgtaagcgcggtcggaagaagctgctgtacatctttaagcaacccttcatgaggcctgtgcagactactcaagaggaggacggctgttcatgccggttcccagaggaggaggaaggcggctgcgaactgcgcgtgaaattcagccgcagcgcagatgctccagcctacaagcaggggcagaaccagctctacaacgaactcaatcttggtcggagagaggagtacgacgtgctggacaagcggagaggacgggacccagaaatgggcgggaagccgcgcagaaagaatccccaagagggcctgtacaacgagctccaaaaggataagatggcagaagcctatagcgagattggtatgaaaggggaacgcagaagaggcaaaggccacgacggactgtaccagggactcagcaccgccaccaaggacacctatgacgctcttcacatgcaggccctgccgcctcgg

SEQ ID NO: 493 - DNA, 723 bp, synthetic construct
  misc_feature 1..723: note = source = /note="Description of Artificial Sequence: Synthetic polynucleotide"
  source 1..723: mol_type = other DNA
caagtccaattgcagcagagcggagcagaagtgaagaagccaggagcgtcagtcaaagtgtcgtgtaaggcgtcaggatacaccttcacgggatactacatgcactgggtgcgccaggccccgggccaaggactcgagtggatgggctggatcaaccctaactctggaggcaccaactacgcccagaatttccaaggcagagtgaccatgacccgggacacctccatctcgactgcctatatggaactgcggcggctgcgctcggacgatactgctgtgtattactgcgccagcggctgggactttgactactggggacagggtactctggtgactgtttcctcgggaggaggcggatcgggtggaggaggtagcgggggaggggggtcgggaggcggaggcagcgatattcgcatgactcaatcgccgtcctccctgagcgctagcgtgggagatcgagtcaccatcacttgcagagcgtcacagtcgattcgctactacctgtcctggtaccagcagaaaccgggaaaggcaccaaagcttctgatctacacggcctccatcctgcaaaatggtgtcccatcaaggttctccgggtcagggagcggcactgacttcactctcaccatctcctcactccagcccgaggactttgcaacctactactgcctccagacgtacaccaccccggatttcggtcctggaaccaaggtggaaatcaaa

SEQ ID NO: 494 - DNA, 1455 bp, synthetic construct
  misc_feature 1..1455: note = source = /note="Description of Artificial Sequence: Synthetic polynucleotide"
  source 1..1455: mol_type = other DNA
atggccctccctgtcaccgccctgctgcttccgctggctcttctgctccacgccgctcggccccaagtccaattgcagcagagcggagcagaagtgaagaagccaggagcgtcagtcaaagtgtcgtgtaaggcgtcaggatacaccttcacgggatactacatgcactgggtgcgccaggccccgggccaaggactcgagtggatgggctggatcaaccctaactctggaggcaccaactacgcccagaatttccaaggcagagtgaccatgacccgggacacctccatctcgactgcctatatggaactgcggcggctgcgctcggacgatactgctgtgtattactgcgccagcggctgggactttgactactggggacagggtactctggtgactgtttcctcgggaggaggcggatcgggtggaggaggtagcgggggaggggggtcgggaggcggaggcagcgatattcgcatgactcaatcgccgtcctccctgagcgctagcgtgggagatcgagtcaccatcacttgcagagcgtcacagtcgattcgctactacctgtcctggtaccagcagaaaccgggaaaggcaccaaagcttctgatctacacggcctccatcctgcaaaatggtgtcccatcaaggttctccgggtcagggagcggcactgacttcactctcaccatctcctcactccagcccgaggactttgcaacctactactgcctccagacgtacaccaccccggatttcggtcctggaaccaaggtggaaatcaaaaccactaccccagcaccgaggccacccaccccggctcctaccatcgcctcccagcctctgtccctgcgtccggaggcatgtagacccgcagctggtggggccgtgcatacccggggtcttgacttcgcctgcgatatctacatttgggcccctctggctggtacttgcggggtcctgctgctttcactcgtgatcactctttactgtaagcgcggtcggaagaagctgctgtacatctttaagcaacccttcatgaggcctgtgcagactactcaagaggaggacggctgttcatgccggttcccagaggaggaggaaggcggctgcgaactgcgcgtgaaattcagccgcagcgcagatgctccagcctacaagcaggggcagaaccagctctacaacgaactcaatcttggtcggagagaggagtacgacgtgctggacaagcggagaggacgggacccagaaatgggcgggaagccgcgcagaaagaatccccaagagggcctgtacaacgagctccaaaaggataagatggcagaagcctatagcgagattggtatgaaaggggaacgcagaagaggcaaaggccacgacggactgtaccagggactcagcaccgccaccaaggacacctatgacgctcttcacatgcaggccctgccgcctcgg

SEQ ID NO: 495 - DNA, 738 bp, synthetic construct
  misc_feature 1..738: note = source = /note="Description of Artificial Sequence: Synthetic polynucleotide"
  source 1..738: mol_type = other DNA
caagtccaactcgtccaaagcggagcagaagtcaaaaagccaggagcgtcggtgaaagtgtcttgcaaagccagcggctacaccttcacgggttactacatgcactgggtgcgccaggcgccgggccaggggctggagtggatgggccggattaaccctaacagcgggggaactaattacgctcagaagttccagggtagagtcaccatgactacggacacttccacttccaccgcctatatggaactgcgctccctccgctcagatgatactgccgtgtattactgcgcgcggactaccacgtcatacgcatttgacatctggggccagggaactatggtgaccgtgagctcgggcggaggcggttcagggggaggaggaagcggaggaggaggatcgggaggaggtggctccgatatccagctgactcagtccccgagcaccctgtcggcgtcggtgggggacagggttaccatcacctgtagagcttcccaatccatttcgacttggctggcctggtaccagcaaaagccgggaaaggcccctaatttgcttatctacaaggcatcgaccctcgaaagcggtgtgccctcccggttttcgggatcaggatcagggaccgagttcaccctgaccatctcatccctccagccggacgacttcgccacttactactgccagcagtacaacacctactcgccatacactttcggccaaggcaccaagctggagatcaag

SEQ ID NO: 496 - DNA, 1470 bp, synthetic construct
  misc_feature 1..1470: note = source = /note="Description of Artificial Sequence: Synthetic polynucleotide"
  source 1..1470: mol_type = other DNA
atggccctccctgtcaccgccctgctgcttccgctggctcttctgctccacgccgctcggccccaagtccaactcgtccaaagcggagcagaagtcaaaaagccaggagcgtcggtgaaagtgtcttgcaaagccagcggctacaccttcacgggttactacatgcactgggtgcgccaggcgccgggccaggggctggagtggatgggccggattaaccctaacagcgggggaactaattacgctcagaagttccagggtagagtcaccatgactacggacacttccacttccaccgcctatatggaactgcgctccctccgctcagatgatactgccgtgtattactgcgcgcggactaccacgtcatacgcatttgacatctggggccagggaactatggtgaccgtgagctcgggcggaggcggttcagggggaggaggaagcggaggaggaggatcgggaggaggtggctccgatatccagctgactcagtccccgagcaccctgtcggcgtcggtgggggacagggttaccatcacctgtagagcttcccaatccatttcgacttggctggcctggtaccagcaaaagccgggaaaggcccctaatttgcttatctacaaggcatcgaccctcgaaagcggtgtgccctcccggttttcgggatcaggatcagggaccgagttcaccctgaccatctcatccctccagccggacgacttcgccacttactactgccagcagtacaacacctactcgccatacactttcggccaaggcaccaagctggagatcaagaccactaccccagcaccgaggccacccaccccggctcctaccatcgcctcccagcctctgtccctgcgtccggaggcatgtagacccgcagctggtggggccgtgcatacccggggtcttgacttcgcctgcgatatctacatttgggcccctctggctggtacttgcggggtcctgctgctttcactcgtgatcactctttactgtaagcgcggtcggaagaagctgctgtacatctttaagcaacccttcatgaggcctgtgcagactactcaagaggaggacggctgttcatgccggttcccagaggaggaggaaggcggctgcgaactgcgcgtgaaattcagccgcagcgcagatgctccagcctacaagcaggggcagaaccagctctacaacgaactcaatcttggtcggagagaggagtacgacgtgctggacaagcggagaggacgggacccagaaatgggcgggaagccgcgcagaaagaatccccaagagggcctgtacaacgagctccaaaaggataagatggcagaagcctatagcgagattggtatgaaaggggaacgcagaagaggcaaaggccacgacggactgtaccagggactcagcaccgccaccaaggacacctatgacgctcttcacatgcaggccctgccgcctcgg

SEQ ID NO: 497 - DNA, 747 bp, synthetic construct
  misc_feature 1..747: note = source = /note="Description of Artificial Sequence: Synthetic polynucleotide"
  source 1..747: mol_type = other DNA
caagttcaactcgtgcaatcaggtggaggactcgtcaaacccggaggatcattgagactgtcatgcgaagcgagcggttttatcttctccgattactatatgggatggattcggcaggccccgggaaagggactcgaatgggtgtcatacatcggaaggtcaggctcgtccatgtactacgcagactcggtgaaaggcagattcacctttagccgggacaacgccaagaattccctctacttgcagatgaacagcctgcgagccgaggatactgctgtctactactgtgccgcgtcgccggtggtggcagctactgaagatttccagcactggggacagggaactctggtcacggtgtcgagcggtgggggcggaagcggaggcggaggatcgggcggcggaggttcgggggggggagggtctgacatcgtgatgacccaaaccccagccaccctgagcctctcccctggagagcgcgcgactctttcgtgccgcgcttcccagtcagtgaccagcaattacttggcttggtaccaacagaagccgggacaggcgccacggctgctgctttttggtgccagcactcgcgccaccggaatcccggatcgcttctcgggctcagggtccgggacggacttcaccctgactatcaaccggctggaacctgaggacttcgcgatgtactactgccagcagtacggctccgcaccagtcactttcggacaaggcaccaagctggagatcaag

SEQ ID NO: 498 - DNA, 1479 bp, synthetic construct
  misc_feature 1..1479: note = source = /note="Description of Artificial Sequence: Synthetic polynucleotide"
  source 1..1479: mol_type = other DNA
atggccctccctgtcaccgccctgctgcttccgctggctcttctgctccacgccgctcggccccaagttcaactcgtgcaatcaggtggaggactcgtcaaacccggaggatcattgagactgtcatgcgaagcgagcggttttatcttctccgattactatatgggatggattcggcaggccccgggaaagggactcgaatgggtgtcatacatcggaaggtcaggctcgtccatgtactacgcagactcggtgaaaggcagattcacctttagccgggacaacgccaagaattccctctacttgcagatgaacagcctgcgagccgaggatactgctgtctactactgtgccgcgtcgccggtggtggcagctactgaagatttccagcactggggacagggaactctggtcacggtgtcgagcggtgggggcggaagcggaggcggaggatcgggcggcggaggttcgggggggggagggtctgacatcgtgatgacccaaaccccagccaccctgagcctctcccctggagagcgcgcgactctttcgtgccgcgcttcccagtcagtgaccagcaattacttggcttggtaccaacagaagccgggacaggcgccacggctgctgctttttggtgccagcactcgcgccaccggaatcccggatcgcttctcgggctcagggtccgggacggacttcaccctgactatcaaccggctggaacctgaggacttcgcgatgtactactgccagcagtacggctccgcaccagtcactttcggacaaggcaccaagctggagatcaagaccactaccccagcaccgaggccacccaccccggctcctaccatcgcctcccagcctctgtccctgcgtccggaggcatgtagacccgcagctggtggggccgtgcatacccggggtcttgacttcgcctgcgatatctacatttgggcccctctggctggtacttgcggggtcctgctgctttcactcgtgatcactctttactgtaagcgcggtcggaagaagctgctgtacatctttaagcaacccttcatgaggcctgtgcagactactcaagaggaggacggctgttcatgccggttcccagaggaggaggaaggcggctgcgaactgcgcgtgaaattcagccgcagcgcagatgctccagcctacaagcaggggcagaaccagctctacaacgaactcaatcttggtcggagagaggagtacgacgtgctggacaagcggagaggacgggacccagaaatgggcgggaagccgcgcagaaagaatccccaagagggcctgtacaacgagctccaaaaggataagatggcagaagcctatagcgagattggtatgaaaggggaacgcagaagaggcaaaggccacgacggactgtaccagggactcagcaccgccaccaaggacacctatgacgctcttcacatgcaggccctgccgcctcgg

SEQ ID NO: 499 - DNA, 747 bp, synthetic construct
  misc_feature 1..747: note = source = /note="Description of Artificial Sequence: Synthetic polynucleotide"
  source 1..747: mol_type = other DNA
caagtccaactcgtccagtcgggagcagaagttagagcaccaggagcgtcagtgaaaatctcatgcaaggcctcgggcttcacgttccgcggatactacatccactgggtgcgccaagccccgggtcagggattggagtggatgggaatcattaacccatcaggagggagccgggcttacgcgcagaagttccagggacgcgtcactatgacccgagatacttccacctcgactgtgtacatggaactctcgtccctgaggtccgacgacactgcgatgtattactgtgctcggactgccagctgcggtggggactgttactacctcgattactggggccagggaactctggtgaccgtgtccagcggaggtggcgggtcagggggtggcggaagcggaggcggcggttcaggcggaggaggctcggacatccaaatgacgcaatcgccgcctaccctgagcgcttccgtgggagatcgggtgaccattacttgcagagcatccgagaacgtcaatatctggctggcctggtaccaacagaagccggggaaggcccctaaactgctgatctacaagtcgagcagccttgcctctggagtgccctcccgcttctcgggctcgggatcaggagcggaattcaccctcaccatctcctccctgcagccagatgactttgccacctactactgccagcagtaccagagctatccgttgacctttgggggaggcactaaagtggacatcaag

SEQ ID NO: 500 - DNA, 1479 bp, synthetic construct
  misc_feature 1..1479: note = source = /note="Description of Artificial Sequence: Synthetic polynucleotide"
  source 1..1479: mol_type = other DNA
atggccctccctgtcaccgccctgctgcttccgctggctcttctgctccacgccgctcggccccaagtccaactcgtccagtcgggagcagaagttagagcaccaggagcgtcagtgaaaatctcatgcaaggcctcgggcttcacgttccgcggatactacatccactgggtgcgccaagccccgggtcagggattggagtggatgggaatcattaacccatcaggagggagccgggcttacgcgcagaagttccagggacgcgtcactatgacccgagatacttccacctcgactgtgtacatggaactctcgtccctgaggtccgacgacactgcgatgtattactgtgctcggactgccagctgcggtggggactgttactacctcgattactggggccagggaactctggtgaccgtgtccagcggaggtggcgggtcagggggtggcggaagcggaggcggcggttcaggcggaggaggctcggacatccaaatgacgcaatcgccgcctaccctgagcgcttccgtgggagatcgggtgaccattacttgcagagcatccgagaacgtcaatatctggctggcctggtaccaacagaagccggggaaggcccctaaactgctgatctacaagtcgagcagccttgcctctggagtgccctcccgcttctcgggctcgggatcaggagcggaattcaccctcaccatctcctccctgcagccagatgactttgccacctactactgccagcagtaccagagctatccgttgacctttgggggaggcactaaagtggacatcaagaccactaccccagcaccgaggccacccaccccggctcctaccatcgcctcccagcctctgtccctgcgtccggaggcatgtagacccgcagctggtggggccgtgcatacccggggtcttgacttcgcctgcgatatctacatttgggcccctctggctggtacttgcggggtcctgctgctttcactcgtgatcactctttactgtaagcgcggtcggaagaagctgctgtacatctttaagcaacccttcatgaggcctgtgcagactactcaagaggaggacggctgttcatgccggttcccagaggaggaggaaggcggctgcgaactgcgcgtgaaattcagccgcagcgcagatgctccagcctacaagcaggggcagaaccagctctacaacgaactcaatcttggtcggagagaggagtacgacgtgctggacaagcggagaggacgggacccagaaatgggcgggaagccgcgcagaaagaatccccaagagggcctgtacaacgagctccaaaaggataagatggcagaagcctatagcgagattggtatgaaaggggaacgcagaagaggcaaaggccacgacggactgtaccagggactcagcaccgccaccaaggacacctatgacgctcttcacatgcaggccctgccgcctcgg

SEQ ID NO: 501 - DNA, 732 bp, synthetic construct
  misc_feature 1..732: note = source = /note="Description of Artificial Sequence: Synthetic polynucleotide"
  source 1..732: mol_type = other DNA
caagttcaactcgttcaatcaggtggaggactcgtgcaaccaggaagatcactcagactcagctgcgccgcgtcgggattcactttcgatgactacgcaatgcactgggtgcggcaggccccgggcaaaggactggaatgggtgagcggaattagctggaactcggggtccatcgggtacgccgactcggtgaagggacgctttacgatctcccgggacaatgccaagaactccctgtatttgcagatgaactccttgagggctgaggacaccgccgtgtactactgcgctaaagatggatcatcgtcctggtcctggggatacttcgattactggggccagggcactctggtgaccgtgtcgtcaggcggtggagggtcgggcggaggaggtagcggaggcggagggagcagctctgaactgacccaagacccggcggtgtcggtcgcccttggtcagactgtgcggactacctgtcagggggacgcgctgcgctcgtactacgcttcatggtaccagcagaagcccggacaggcacctatgctggtcatctacggaaagaataaccgcccatccggcatcccggatcgcttctcgggttcggacagcggcgacaccgcatccctgacgatcactggagcgcaggccgaggatgaagccgactactactgcaattcccgagattcaagcggctaccctgtgtttgggaccggaactaaggtcaccgtcctg

SEQ ID NO: 502 - DNA, 1464 bp, synthetic construct
  misc_feature 1..1464: note = source = /note="Description of Artificial Sequence: Synthetic polynucleotide"
  source 1..1464: mol_type = other DNA
atggccctccctgtcaccgccctgctgcttccgctggctcttctgctccacgccgctcggccccaagttcaactcgttcaatcaggtggaggactcgtgcaaccaggaagatcactcagactcagctgcgccgcgtcgggattcactttcgatgactacgcaatgcactgggtgcggcaggccccgggcaaaggactggaatgggtgagcggaattagctggaactcggggtccatcgggtacgccgactcggtgaagggacgctttacgatctcccgggacaatgccaagaactccctgtatttgcagatgaactccttgagggctgaggacaccgccgtgtactactgcgctaaagatggatcatcgtcctggtcctggggatacttcgattactggggccagggcactctggtgaccgtgtcgtcaggcggtggagggtcgggcggaggaggtagcggaggcggagggagcagctctgaactgacccaagacccggcggtgtcggtcgcccttggtcagactgtgcggactacctgtcagggggacgcgctgcgctcgtactacgcttcatggtaccagcagaagcccggacaggcacctatgctggtcatctacggaaagaataaccgcccatccggcatcccggatcgcttctcgggttcggacagcggcgacaccgcatccctgacgatcactggagcgcaggccgaggatgaagccgactactactgcaattcccgagattcaagcggctaccctgtgtttgggaccggaactaaggtcaccgtcctgaccactaccccagcaccgaggccacccaccccggctcctaccatcgcctcccagcctctgtccctgcgtccggaggcatgtagacccgcagctggtggggccgtgcatacccggggtcttgacttcgcctgcgatatctacatttgggcccctctggctggtacttgcggggtcctgctgctttcactcgtgatcactctttactgtaagcgcggtcggaagaagctgctgtacatctttaagcaacccttcatgaggcctgtgcagactactcaagaggaggacggctgttcatgccggttcccagaggaggaggaaggcggctgcgaactgcgcgtgaaattcagccgcagcgcagatgctccagcctacaagcaggggcagaaccagctctacaacgaactcaatcttggtcggagagaggagtacgacgtgctggacaagcggagaggacgggacccagaaatgggcgggaagccgcgcagaaagaatccccaagagggcctgtacaacgagctccaaaaggataagatggcagaagcctatagcgagattggtatgaaaggggaacgcagaagaggcaaaggccacgacggactgtaccagggactcagcaccgccaccaaggacacctatgacgctcttcacatgcaggccctgccgcctcgg

SEQ ID NO: 503 - DNA, 738 bp, synthetic construct
  misc_feature 1..738: note = source = /note="Description of Artificial Sequence: Synthetic polynucleotide"
  source 1..738: mol_type = other DNA
gaagtgcaactcgtggaatctggtggaggacttgtgcaacctggaagatcgttgagactctcatgtgctgcctccgggttcacctttgacgactacgccatgcactgggtgcgccaggcaccaggaaagggtctggagtgggtttcgggtatctcgtggaactccgggagcactggctacgctgattcggtgaaaggccggtttaccatctcccgagacaatgcgaagaattccctctatctgcagatgaacagcctccgggccgaggatactgccctgtactactgcgccaaggatagctcatcatggtacggaggtggatcggctttcgatatctggggccagggcacgatggtcaccgtgtcctcggggggcggaggctccgggggaggaggtagcggaggaggaggatcgagctcagagttgactcaagaacccgcagtgtccgtggcactgggccaaaccgtcaggatcacttgccagggagacagcctgaggtcgtactacgcgtcctggtaccagcagaagccgggacaggccccggtcctggtcattttcggacgctcaagacgcccatcgggcatcccggaccggttcagcggaagctcctcgggaaacaccgcgtcacttatcattaccggcgcacaggctgaggacgaagcggattactactgcaactcccgcgacaatactgccaaccattacgtgttcgggaccggaacgaaactgactgtcctg

SEQ ID NO: 504 - DNA, 1470 bp, synthetic construct
  misc_feature 1..1470: note = source = /note="Description of Artificial Sequence: Synthetic polynucleotide"
  source 1..1470: mol_type = other DNA
atggccctccctgtcaccgccctgctgcttccgctggctcttctgctccacgccgctcggcccgaagtgcaactcgtggaatctggtggaggacttgtgcaacctggaagatcgttgagactctcatgtgctgcctccgggttcacctttgacgactacgccatgcactgggtgcgccaggcaccaggaaagggtctggagtgggtttcgggtatctcgtggaactccgggagcactggctacgctgattcggtgaaaggccggtttaccatctcccgagacaatgcgaagaattccctctatctgcagatgaacagcctccgggccgaggatactgccctgtactactgcgccaaggatagctcatcatggtacggaggtggatcggctttcgatatctggggccagggcacgatggtcaccgtgtcctcggggggcggaggctccgggggaggaggtagcggaggaggaggatcgagctcagagttgactcaagaacccgcagtgtccgtggcactgggccaaaccgtcaggatcacttgccagggagacagcctgaggtcgtactacgcgtcctggtaccagcagaagccgggacaggccccggtcctggtcattttcggacgctcaagacgcccatcgggcatcccggaccggttcagcggaagctcctcgggaaacaccgcgtcacttatcattaccggcgcacaggctgaggacgaagcggattactactgcaactcccgcgacaatactgccaaccattacgtgttcgggaccggaacgaaactgactgtcctgaccactaccccagcaccgaggccacccaccccggctcctaccatcgcctcccagcctctgtccctgcgtccggaggcatgtagacccgcagctggtggggccgtgcatacccggggtcttgacttcgcctgcgatatctacatttgggcccctctggctggtacttgcggggtcctgctgctttcactcgtgatcactctttactgtaagcgcggtcggaagaagctgctgtacatctttaagcaacccttcatgaggcctgtgcagactactcaagaggaggacggctgttcatgccggttcccagaggaggaggaaggcggctgcgaactgcgcgtgaaattcagccgcagcgcagatgctccagcctacaagcaggggcagaaccagctctacaacgaactcaatcttggtcggagagaggagtacgacgtgctggacaagcggagaggacgggacccagaaatgggcgggaagccgcgcagaaagaatccccaagagggcctgtacaacgagctccaaaaggataagatggcagaagcctatagcgagattggtatgaaaggggaacgcagaagaggcaaaggccacgacggactgtaccagggactcagcaccgccaccaaggacacctatgacgctcttcacatgcaggccctgccgcctcgg

SEQ ID NO: 505 - DNA, 738 bp, synthetic construct
  misc_feature 1..738: note = source = /note="Description of Artificial Sequence: Synthetic polynucleotide"
  source 1..738: mol_type = other DNA
gaagttcaattggtggaatctggaggaggacttgtgcaacccggtagatctctgagactgtcctgtgcggcatcgggattcaccttcgacgactacgctatgcactgggtgagacaagcccctggaaaaggactggagtgggtgtcaggcatctcctggaatagcgggtccactggatacgccgattcggtcaagggtcgcttcaccatttcccgggacaatgccaagaactccctgtaccttcaaatgaactccctccgggccgaggataccgccctctactactgcgccaaagacagctcgtcatggtatggcggagggtcggcatttgacatctggggacagggaactatggtgactgtgtcatcaggaggcggcggaagcggcggcggcgggtccggcggaggagggtcgtccagcgaactcacccaagatccagcagtgagcgtcgcgctgggccagaccgtcaggatcacgtgccagggagattcactgcgctcatactacgcgtcctggtaccagcagaagccggggcaggccccggtcctcgtgatctacggaaagaacaaccgcccgtcgggtatcccagaccgcttttcgggtagctccagcggaaatacggctagcctgaccatcactggagcacaggctgaggatgaagcggactactactgcaattcgcggggctcatcggggaaccattacgtgttcggaactggtaccaaggtgactgtcctg

SEQ ID NO: 506 - DNA, 1470 bp, synthetic construct
  misc_feature 1..1470: note = source = /note="Description of Artificial Sequence: Synthetic polynucleotide"
  source 1..1470: mol_type = other DNA
atggccctccctgtcaccgccctgctgcttccgctggctcttctgctccacgccgctcggcccgaagttcaattggtggaatctggaggaggacttgtgcaacccggtagatctctgagactgtcctgtgcggcatcgggattcaccttcgacgactacgctatgcactgggtgagacaagcccctggaaaaggactggagtgggtgtcaggcatctcctggaatagcgggtccactggatacgccgattcggtcaagggtcgcttcaccatttcccgggacaatgccaagaactccctgtaccttcaaatgaactccctccgggccgaggataccgccctctactactgcgccaaagacagctcgtcatggtatggcggagggtcggcatttgacatctggggacagggaactatggtgactgtgtcatcaggaggcggcggaagcggcggcggcgggtccggcggaggagggtcgtccagcgaactcacccaagatccagcagtgagcgtcgcgctgggccagaccgtcaggatcacgtgccagggagattcactgcgctcatactacgcgtcctggtaccagcagaagccggggcaggccccggtcctcgtgatctacggaaagaacaaccgcccgtcgggtatcccagaccgcttttcgggtagctccagcggaaatacggctagcctgaccatcactggagcacaggctgaggatgaagcggactactactgcaattcgcggggctcatcggggaaccattacgtgttcggaactggtaccaaggtgactgtcctgaccactaccccagcaccgaggccacccaccccggctcctaccatcgcctcccagcctctgtccctgcgtccggaggcatgtagacccgcagctggtggggccgtgcatacccggggtcttgacttcgcctgcgatatctacatttgggcccctctggctggtacttgcggggtcctgctgctttcactcgtgatcactctttactgtaagcgcggtcggaagaagctgctgtacatctttaagcaacccttcatgaggcctgtgcagactactcaagaggaggacggctgttcatgccggttcccagaggaggaggaaggcggctgcgaactgcgcgtgaaattcagccgcagcgcagatgctccagcctacaagcaggggcagaaccagctctacaacgaactcaatcttggtcggagagaggagtacgacgtgctggacaagcggagaggacgggacccagaaatgggcgggaagccgcgcagaaagaatccccaagagggcctgtacaacgagctccaaaaggataagatggcagaagcctatagcgagattggtatgaaaggggaacgcagaagaggcaaaggccacgacggactgtaccagggactcagcaccgccaccaaggacacctatgacgctcttcacatgcaggccctgccgcctcgg

SEQ ID NO: 507 - DNA, 753 bp, synthetic construct
  misc_feature 1..753: note = source = /note="Description of Artificial Sequence: Synthetic polynucleotide"
  source 1..753: mol_type = other DNA
caagtgcagctcgttcaatcaggcggaggactcgttcaaccaggaggatcattgcgactctcatgtgcggcctctggattcacgtttagctcatattggatgcactgggtgcggcaggcgccggggaaaggtctggtgtgggtcagccgcatcaactcagacggctcctcgacttcgtacgccgactccgtgaagggacgctttaccatttcccgcgacaacgccaagaataccctttaccttcagatgaactccctccgcgctgaggataccgccgtgtactactgcgtgaggactggctgggtcggcagctactactactacatggacgtgtggggcaaaggaactactgtcaccgtgtcaagcggcggtggaggttccggcgggggaggatcgggggggggcggatcgggtggcggaggatcggagatcgtgttgacccagtcgccgggaaccctgtcgctgtcgcctggggagagagcaactctgtcctgccgggcttcccagtcggtgtcgagcaattacctggcatggtaccaacagaagccgggacagccgccacgcctgctgatctatgacgtgtcaactcgggcaactggaatccctgcgcggttcagcggcggagggagcggtaccgatttcaccctgactatttcctccctcgaaccagaagatttcgccgtctactactgccagcagagaagcaactggccgccctggacgttcggacaaggaaccaaggtcgaaatcaag

SEQ ID NO: 508 - DNA, 1485 bp, synthetic construct
  misc_feature 1..1485: note = source = /note="Description of Artificial Sequence: Synthetic polynucleotide"
  source 1..1485: mol_type = other DNA
atggccctccctgtcaccgccctgctgcttccgctggctcttctgctccacgccgctcggccccaagtgcagctcgttcaatcaggcggaggactcgttcaaccaggaggatcattgcgactctcatgtgcggcctctggattcacgtttagctcatattggatgcactgggtgcggcaggcgccggggaaaggtctggtgtgggtcagccgcatcaactcagacggctcctcgacttcgtacgccgactccgtgaagggacgctttaccatttcccgcgacaacgccaagaataccctttaccttcagatgaactccctccgcgctgaggataccgccgtgtactactgcgtgaggactggctgggtcggcagctactactactacatggacgtgtggggcaaaggaactactgtcaccgtgtcaagcggcggtggaggttccggcgggggaggatcgggggggggcggatcgggtggcggaggatcggagatcgtgttgacccagtcgccgggaaccctgtcgctgtcgcctggggagagagcaactctgtcctgccgggcttcccagtcggtgtcgagcaattacctggcatggtaccaacagaagccgggacagccgccacgcctgctgatctatgacgtgtcaactcgggcaactggaatccctgcgcggttcagcggcggagggagcggtaccgatttcaccctgactatttcctccctcgaaccagaagatttcgccgtctactactgccagcagagaagcaactggccgccctggacgttcggacaaggaaccaaggtcgaaatcaagaccactaccccagcaccgaggccacccaccccggctcctaccatcgcctcccagcctctgtccctgcgtccggaggcatgtagacccgcagctggtggggccgtgcatacccggggtcttgacttcgcctgcgatatctacatttgggcccctctggctggtacttgcggggtcctgctgctttcactcgtgatcactctttactgtaagcgcggtcggaagaagctgctgtacatctttaagcaacccttcatgaggcctgtgcagactactcaagaggaggacggctgttcatgccggttcccagaggaggaggaaggcggctgcgaactgcgcgtgaaattcagccgcagcgcagatgctccagcctacaagcaggggcagaaccagctctacaacgaactcaatcttggtcggagagaggagtacgacgtgctggacaagcggagaggacgggacccagaaatgggcgggaagccgcgcagaaagaatccccaagagggcctgtacaacgagctccaaaaggataagatggcagaagcctatagcgagattggtatgaaaggggaacgcagaagaggcaaaggccacgacggactgtaccagggactcagcaccgccaccaaggacacctatgacgctcttcacatgcaggccctgccgcctcgg

SEQ ID NO: 509 - DNA, 750 bp, synthetic construct
  misc_feature 1..750: note = source = /note="Description of Artificial Sequence: Synthetic polynucleotide"
  source 1..750: mol_type = other DNA
caagtgcaattggttcaatcaggaggaggagtcgtgcagcccggaagatcgttgagactgtcatgtgccgcgagcggctttactttctcaagctacggaatgcattgggtgcgacaggctccgggaaaaggactggaatgggtcgcagtgatctcatacgacggctcgaacaagtactacgccgactccgtcaagggtcggttcacgatttcgcgcgataattccaagaacactctgtacctccaaatgaacagcctccgggcagaggacaccgccgtctactactgcgctaagggatactcgcgctactactactatggaatggatgtgtggggccagggaactaccgtgacggtgtcgtccggcggcggtgggtcgggcggaggcggatcaggtggaggtggaagcggaggaggagggagcgaaatcgtcatgactcagtcccctgctaccctttctctgtcgccgggagaaagagccatcctgagctgccgggcctcccagagcgtgtacaccaaatacctgggatggtaccagcagaagccggggcaggcaccaaggctcctgatctacgatgcgtccacccgcgcgactggtatcccagaccgcttttccggctcggggtcagggactgacttcacccttactatcaatcggctcgagcctgaggatttcgccgtgtattactgccagcactacggagggtccccgctgattaccttcggccaaggcaccaaagtggacatcaag

SEQ ID NO: 510 - DNA, 1482 bp, synthetic construct
  misc_feature 1..1482: note = source = /note="Description of Artificial Sequence: Synthetic polynucleotide"
  source 1..1482: mol_type = other DNA
atggccctccctgtcaccgccctgctgcttccgctggctcttctgctccacgccgctcggccccaagtgcaattggttcaatcaggaggaggagtcgtgcagcccggaagatcgttgagactgtcatgtgccgcgagcggctttactttctcaagctacggaatgcattgggtgcgacaggctccgggaaaaggactggaatgggtcgcagtgatctcatacgacggctcgaacaagtactacgccgactccgtcaagggtcggttcacgatttcgcgcgataattccaagaacactctgtacctccaaatgaacagcctccgggcagaggacaccgccgtctactactgcgctaagggatactcgcgctactactactatggaatggatgtgtggggccagggaactaccgtgacggtgtcgtccggcggcggtgggtcgggcggaggcggatcaggtggaggtggaagcggaggaggagggagcgaaatcgtcatgactcagtcccctgctaccctttctctgtcgccgggagaaagagccatcctgagctgccgggcctcccagagcgtgtacaccaaatacctgggatggtaccagcagaagccggggcaggcaccaaggctcctgatctacgatgcgtccacccgcgcgactggtatcccagaccgcttttccggctcggggtcagggactgacttcacccttactatcaatcggctcgagcctgaggatttcgccgtgtattactgccagcactacggagggtccccgctgattaccttcggccaaggcaccaaagtggacatcaagaccactaccccagcaccgaggccacccaccccggctcctaccatcgcctcccagcctctgtccctgcgtccggaggcatgtagacccgcagctggtggggccgtgcatacccggggtcttgacttcgcctgcgatatctacatttgggcccctctggctggtacttgcggggtcctgctgctttcactcgtgatcactctttactgtaagcgcggtcggaagaagctgctgtacatctttaagcaacccttcatgaggcctgtgcagactactcaagaggaggacggctgttcatgccggttcccagaggaggaggaaggcggctgcgaactgcgcgtgaaattcagccgcagcgcagatgctccagcctacaagcaggggcagaaccagctctacaacgaactcaatcttggtcggagagaggagtacgacgtgctggacaagcggagaggacgggacccagaaatgggcgggaagccgcgcagaaagaatccccaagagggcctgtacaacgagctccaaaaggataagatggcagaagcctatagcgagattggtatgaaaggggaacgcagaagaggcaaaggccacgacggactgtaccagggactcagcaccgccaccaaggacacctatgacgctcttcacatgcaggccctgccgcctcgg

SEQ ID NO: 511 - DNA, 747 bp, synthetic construct
  misc_feature 1..747: note = source = /note="Description of Artificial Sequence: Synthetic polynucleotide"
  source 1..747: mol_type = other DNA
caagtgcaacttgttcaatcaggaggaggactcgttcaacccggaggatcactgcgactctcatgtgcagcgtcggggttcaccttctccagctacgcaatgtcctgggtgcgccaagcccctggaaaaggcctggagtgggtgtcggccatctctgggagcgggggatcaacttactacgctgactccgtcaagggccgctttaccatctcccgggacaacagcaagaacactctctatctccagatgaactcgctgagagccgaagataccgctgtctactactgcgcgaagagagaagctgccgcagggcacgattggtacttcgacttgtggggcaggggcacccttgtgaccgtgtcctccggtggaggcggatcaggaggtgggggatcgggtggaggaggaagcggaggcggcggttcggacattcgcgtcacccagtcaccgagctccctcagcgcatcggtgggcgaccgggtcactatcacttgccgggcgtcccagtcgatctcatcgtatctgaattggtaccagcagaaaccgggaaaggcgccgaagctgttgatctacgctgccagctccctgcagtcgggtgtgccatcacgcttttccggctcgggatcgggaaccgatttcactctgacgatctctagcctgcagccagaagatttcgccacttactactgccagcagtcctacagcatccctctgactttcggacaagggacgaaagtggagattaag

SEQ ID NO: 512 - DNA, 1479 bp, synthetic construct
  misc_feature 1..1479: note = source = /note="Description of Artificial Sequence: Synthetic polynucleotide"
  source 1..1479: mol_type = other DNA
atggccctccctgtcaccgccctgctgcttccgctggctcttctgctccacgccgctcggccccaagtgcaacttgttcaatcaggaggaggactcgttcaacccggaggatcactgcgactctcatgtgcagcgtcggggttcaccttctccagctacgcaatgtcctgggtgcgccaagcccctggaaaaggcctggagtgggtgtcggccatctctgggagcgggggatcaacttactacgctgactccgtcaagggccgctttaccatctcccgggacaacagcaagaacactctctatctccagatgaactcgctgagagccgaagataccgctgtctactactgcgcgaagagagaagctgccgcagggcacgattggtacttcgacttgtggggcaggggcacccttgtgaccgtgtcctccggtggaggcggatcaggaggtgggggatcgggtggaggaggaagcggaggcggcggttcggacattcgcgtcacccagtcaccgagctccctcagcgcatcggtgggcgaccgggtcactatcacttgccgggcgtcccagtcgatctcatcgtatctgaattggtaccagcagaaaccgggaaaggcgccgaagctgttgatctacgctgccagctccctgcagtcgggtgtgccatcacgcttttccggctcgggatcgggaaccgatttcactctgacgatctctagcctgcagccagaagatttcgccacttactactgccagcagtcctacagcatccctctgactttcggacaagggacgaaagtggagattaagaccactaccccagcaccgaggccacccaccccggctcctaccatcgcctcccagcctctgtccctgcgtccggaggcatgtagacccgcagctggtggggccgtgcatacccggggtcttgacttcgcctgcgatatctacatttgggcccctctggctggtacttgcggggtcctgctgctttcactcgtgatcactctttactgtaagcgcggtcggaagaagctgctgtacatctttaagcaacccttcatgaggcctgtgcagactactcaagaggaggacggctgttcatgccggttcccagaggaggaggaaggcggctgcgaactgcgcgtgaaattcagccgcagcgcagatgctccagcctacaagcaggggcagaaccagctctacaacgaactcaatcttggtcggagagaggagtacgacgtgctggacaagcggagaggacgggacccagaaatgggcgggaagccgcgcagaaagaatccccaagagggcctgtacaacgagctccaaaaggataagatggcagaagcctatagcgagattggtatgaaaggggaacgcagaagaggcaaaggccacgacggactgtaccagggactcagcaccgccaccaaggacacctatgacgctcttcacatgcaggccctgccgcctcgg

SEQ ID NO: 513 - DNA, 741 bp, synthetic construct
  misc_feature 1..741: note = source = /note="Description of Artificial Sequence: Synthetic polynucleotide"
  source 1..741: mol_type = other DNA
caagtccaactcgttcagtcatgggcagaagtcaagaaacccggtgcaagcgtcaaagtgtcgtgtaaggcctccggctacactttcacttcctactacatgcactgggtgcgccaagccccgggacagggccttgaatggatgggcatcatcaacccatcaggaggttccacgagctacgcgcagaagttccaggggagagtgacgatgactagagatacctccacgagcaccgtctacatggagctgtcgaatctgcggtcagaggacactgctgtgtattactgcgcgcgctccccgcgggtgaccactggctactttgactactggggacaagggaccctggtgaccgtcagctcgggaggcggaggatcgggaggtggagggtccggtggaggcggctctggaggaggcgggtcggacattcaattgacccagagcccatccaccctctcagcctcggtgggggatagggtgactatcacttgccgggcctcccagtcaatttccagctggctggcttggtaccagcaaaagcctggaaaggcaccgaagctcctgatctacaaggcctcatctctggaatcaggagtgccttcgcgcttcagcggaagcggctcgggaactgagtttaccctgaccatctcgagcctgcagccagatgacttcgcgacctattactgccagcagtactcgtcctacccgttgactttcggaggaggtacccgcctcgaaatcaaa

SEQ ID NO: 514 - DNA, 1473 bp, synthetic construct
  misc_feature 1..1473: note = source = /note="Description of Artificial Sequence: Synthetic polynucleotide"
  source 1..1473: mol_type = other DNA
atggccctccctgtcaccgccctgctgcttccgctggctcttctgctccacgccgctcggccccaagtccaactcgttcagtcatgggcagaagtcaagaaacccggtgcaagcgtcaaagtgtcgtgtaaggcctccggctacactttcacttcctactacatgcactgggtgcgccaagccccgggacagggccttgaatggatgggcatcatcaacccatcaggaggttccacgagctacgcgcagaagttccaggggagagtgacgatgactagagatacctccacgagcaccgtctacatggagctgtcgaatctgcggtcagaggacactgctgtgtattactgcgcgcgctccccgcgggtgaccactggctactttgactactggggacaagggaccctggtgaccgtcagctcgggaggcggaggatcgggaggtggagggtccggtggaggcggctctggaggaggcgggtcggacattcaattgacccagagcccatccaccctctcagcctcggtgggggatagggtgactatcacttgccgggcctcccagtcaatttccagctggctggcttggtaccagcaaaagcctggaaaggcaccgaagctcctgatctacaaggcctcatctctggaatcaggagtgccttcgcgcttcagcggaagcggctcgggaactgagtttaccctgaccatctcgagcctgcagccagatgacttcgcgacctattactgccagcagtactcgtcctacccgttgactttcggaggaggtacccgcctcgaaatcaaaaccactaccccagcaccgaggccacccaccccggctcctaccatcgcctcccagcctctgtccctgcgtccggaggcatgtagacccgcagctggtggggccgtgcatacccggggtcttgacttcgcctgcgatatctacatttgggcccctctggctggtacttgcggggtcctgctgctttcactcgtgatcactctttactgtaagcgcggtcggaagaagctgctgtacatctttaagcaacccttcatgaggcctgtgcagactactcaagaggaggacggctgttcatgccggttcccagaggaggaggaaggcggctgcgaactgcgcgtgaaattcagccgcagcgcagatgctccagcctacaagcaggggcagaaccagctctacaacgaactcaatcttggtcggagagaggagtacgacgtgctggacaagcggagaggacgggacccagaaatgggcgggaagccgcgcagaaagaatccccaagagggcctgtacaacgagctccaaaaggataagatggcagaagcctatagcgagattggtatgaaaggggaacgcagaagaggcaaaggccacgacggactgtaccagggactcagcaccgccaccaaggacacctatgacgctcttcacatgcaggccctgccgcctcgg

SEQ ID NO: 515 - DNA, 759 bp, synthetic construct
  misc_feature 1..759: note = source = /note="Description of Artificial Sequence: Synthetic polynucleotide"
  source 1..759: mol_type = other DNA
caagtccaactcgtccagtccggtgcagaagtcagaaggccaggagcaagcgtgaagatctcgtgtagagcgtcaggagacaccagcactcgccattacatccactggctgcgccaggctccgggccaagggccggagtggatgggtgtgatcaacccgactacgggaccggctaccggaagccctgcgtacgcacagatgctgcagggacgggtgactatgacccgcgatactagcactaggaccgtgtacatggaactccgctcgttgcggttcgaagataccgccgtctactactgcgcccggtccgtggtgggccgaagcgccccttactacttcgattactggggacagggcactctggtgaccgttagctccggtgggggaggctcgggtggaggcggatcgggaggaggaggcagcggtggagggggatcggacattcagatgacccagtcaccctcctccctctcagcctcggtcggggaccgggtgaccattacgtgcagagcctcacaagggatctcggactactccgcctggtaccagcagaaaccgggaaaagcgccaaagctcctgatctacgccgcgagcaccctgcaatcaggagtgccatcgcgcttttctggatcgggctcagggactgacttcacgctgactatctcctaccttcagtccgaggatttcgctacctactactgccaacagtattactcctatcccctgacctttggcggaggcactaaggtggacatcaag

SEQ ID NO: 516 - DNA, 1491 bp, synthetic construct
  misc_feature 1..1491: note = source = /note="Description of Artificial Sequence: Synthetic polynucleotide"
  source 1..1491: mol_type = other DNA
atggccctccctgtcaccgccctgctgcttccgctggctcttctgctccacgccgctcggccccaagtccaactcgtccagtccggtgcagaagtcagaaggccaggagcaagcgtgaagatctcgtgtagagcgtcaggagacaccagcactcgccattacatccactggctgcgccaggctccgggccaagggccggagtggatgggtgtgatcaacccgactacgggaccggctaccggaagccctgcgtacgcacagatgctgcagggacgggtgactatgacccgcgatactagcactaggaccgtgtacatggaactccgctcgttgcggttcgaagataccgccgtctactactgcgcccggtccgtggtgggccgaagcgccccttactacttcgattactggggacagggcactctggtgaccgttagctccggtgggggaggctcgggtggaggcggatcgggaggaggaggcagcggtggagggggatcggacattcagatgacccagtcaccctcctccctctcagcctcggtcggggaccgggtgaccattacgtgcagagcctcacaagggatctcggactactccgcctggtaccagcagaaaccgggaaaagcgccaaagctcctgatctacgccgcgagcaccctgcaatcaggagtgccatcgcgcttttctggatcgggctcagggactgacttcacgctgactatctcctaccttcagtccgaggatttcgctacctactactgccaacagtattactcctatcccctgacctttggcggaggcactaaggtggacatcaagaccactaccccagcaccgaggccacccaccccggctcctaccatcgcctcccagcctctgtccctgcgtccggaggcatgtagacccgcagctggtggggccgtgcatacccggggtcttgacttcgcctgcgatatctacatttgggcccctctggctggtacttgcggggtcctgctgctttcactcgtgatcactctttactgtaagcgcggtcggaagaagctgctgtacatctttaagcaacccttcatgaggcctgtgcagactactcaagaggaggacggctgttcatgccggttcccagaggaggaggaaggcggctgcgaactgcgcgtgaaattcagccgcagcgcagatgctccagcctacaagcaggggcagaaccagctctacaacgaactcaatcttggtcggagagaggagtacgacgtgctggacaagcggagaggacgggacccagaaatgggcgggaagccgcgcagaaagaatccccaagagggcctgtacaacgagctccaaaaggataagatggcagaagcctatagcgagattggtatgaaaggggaacgcagaagaggcaaaggccacgacggactgtaccagggactcagcaccgccaccaaggacacctatgacgctcttcacatgcaggccctgccgcctcgg

SEQ ID NO: 517 - DNA, 747 bp, synthetic construct
  misc_feature 1..747: note = source = /note="Description of Artificial Sequence: Synthetic polynucleotide"
  source 1..747: mol_type = other DNA
caagtccaactccagcaatcgggagcagaagtcaagaaaccaggcgcatcggtgaaagtgtcgtgtaaggcgtcagggtacaccttcaccaactactatatgcactgggtgcgccaggctccaggccaggggttggagtggatggggatcatcaatccgtcaggtggctacaccacttacgctcagaagttccagggacgcctcactatgactcgcgatactagcacctccacggtgtacatggaactgtcatcgctgaggtccgaagataccgccgtctactactgcgcacggatcagatcctgcggaggagattgttactactttgacaactggggacagggcacccttgttactgtgtcatcgggaggagggggaagcggaggaggtggatcaggcggcggtggcagcgggggcggaggatcggacattcagctgactcagtccccctccactttgtcggccagcgtgggagacagagtgaccatcacttgccgggcgtccgagaacgtcaatatctggctggcctggtaccagcaaaagcctggaaaagccccgaagctgctcatctataagtcatccagcctggcgtctggtgtgccgtcgcggttctccggcagcgggagcggagccgagttcactctcaccatttcgagccttcaaccggacgatttcgccacctactactgccagcagtaccaatcctaccctctgacgtttggaggtggaaccaaggtggacatcaag

SEQ ID NO: 518 - DNA, 1479 bp, synthetic construct
  misc_feature 1..1479: note = source = /note="Description of Artificial Sequence: Synthetic polynucleotide"
  source 1..1479: mol_type = other DNA
atggccctccctgtcaccgccctgctgcttccgctggctcttctgctccacgccgctcggccccaagtccaactccagcaatcgggagcagaagtcaagaaaccaggcgcatcggtgaaagtgtcgtgtaaggcgtcagggtacaccttcaccaactactatatgcactgggtgcgccaggctccaggccaggggttggagtggatggggatcatcaatccgtcaggtggctacaccacttacgctcagaagttccagggacgcctcactatgactcgcgatactagcacctccacggtgtacatggaactgtcatcgctgaggtccgaagataccgccgtctactactgcgcacggatcagatcctgcggaggagattgttactactttgacaactggggacagggcacccttgttactgtgtcatcgggaggagggggaagcggaggaggtggatcaggcggcggtggcagcgggggcggaggatcggacattcagctgactcagtccccctccactttgtcggccagcgtgggagacagagtgaccatcacttgccgggcgtccgagaacgtcaatatctggctggcctggtaccagcaaaagcctggaaaagccccgaagctgctcatctataagtcatccagcctggcgtctggtgtgccgtcgcggttctccggcagcgggagcggagccgagttcactctcaccatttcgagccttcaaccggacgatttcgccacctactactgccagcagtaccaatcctaccctctgacgtttggaggtggaaccaaggtggacatcaagaccactaccccagcaccgaggccacccaccccggctcctaccatcgcctcccagcctctgtccctgcgtccggaggcatgtagacccgcagctggtggggccgtgcatacccggggtcttgacttcgcctgcgatatctacatttgggcccctctggctggtacttgcggggtcctgctgctttcactcgtgatcactctttactgtaagcgcggtcggaagaagctgctgtacatctttaagcaacccttcatgaggcctgtgcagactactcaagaggaggacggctgttcatgccggttcccagaggaggaggaaggcggctgcgaactgcgcgtgaaattcagccgcagcgcagatgctccagcctacaagcaggggcagaaccagctctacaacgaactcaatcttggtcggagagaggagtacgacgtgctggacaagcggagaggacgggacccagaaatgggcgggaagccgcgcagaaagaatccccaagagggcctgtacaacgagctccaaaaggataagatggcagaagcctatagcgagattggtatgaaaggggaacgcagaagaggcaaaggccacgacggactgtaccagggactcagcaccgccaccaaggacacctatgacgctcttcacatgcaggccctgccgcctcgg

SEQ ID NO: 519 - DNA, 738 bp, synthetic construct
  misc_feature 1..738: note = source = /note="Description of Artificial Sequence: Synthetic polynucleotide"
  source 1..738: mol_type = other DNA
caaatcactctgaaagaatctggaccggccctggttaagccgactcaaacgctcacccttacttgcaccttcagcggattctcactcagcactgctggtgtgcacgtcggatggattagacagccgcctggaaaggccctggaatggctcgccctcatctcctgggccgatgacaagagatacaggccctcgcttcgatcccggttggacattacccgggtgacctcgaaagatcaggtggtgctctcaatgaccaatatgcagccggaggacaccgctacgtactactgcgcactgcaaggatttgacggctacgaggctaactggggaccaggtactctggtcaccgtgagctccggcgggggaggatcaggcgggggggggtcaggaggcggaggctccggtggaggaggatcggatatcgtcatgacccagtccccaagctcgctgagcgcgtcagcgggcgaccgcgtgactatcacttgccgggccagccgcggcatctcctccgcactggcgtggtaccagcagaagcctggaaaaccgccaaagctcctgatctatgatgcctccagcctggagtcaggtgtccccagccgcttctcgggttcgggctcgggaaccgacttcactttgaccatcgactcgctggaaccggaagatttcgcaacctactactgtcagcagtcctactcgaccccttggacttttggacaagggacgaaggtggacatcaag

SEQ ID NO: 520 - DNA, 1470 bp, synthetic construct
  misc_feature 1..1470: note = source = /note="Description of Artificial Sequence: Synthetic polynucleotide"
  source 1..1470: mol_type = other DNA
atggccctccctgtcaccgccctgctgcttccgctggctcttctgctccacgccgctcggccccaaatcactctgaaagaatctggaccggccctggttaagccgactcaaacgctcacccttacttgcaccttcagcggattctcactcagcactgctggtgtgcacgtcggatggattagacagccgcctggaaaggccctggaatggctcgccctcatctcctgggccgatgacaagagatacaggccctcgcttcgatcccggttggacattacccgggtgacctcgaaagatcaggtggtgctctcaatgaccaatatgcagccggaggacaccgctacgtactactgcgcactgcaaggatttgacggctacgaggctaactggggaccaggtactctggtcaccgtgagctccggcgggggaggatcaggcgggggggggtcaggaggcggaggctccggtggaggaggatcggatatcgtcatgacccagtccccaagctcgctgagcgcgtcagcgggcgaccgcgtgactatcacttgccgggccagccgcggcatctcctccgcactggcgtggtaccagcagaagcctggaaaaccgccaaagctcctgatctatgatgcctccagcctggagtcaggtgtccccagccgcttctcgggttcgggctcgggaaccgacttcactttgaccatcgactcgctggaaccggaagatttcgcaacctactactgtcagcagtcctactcgaccccttggacttttggacaagggacgaaggtggacatcaagaccactaccccagcaccgaggccacccaccccggctcctaccatcgcctcccagcctctgtccctgcgtccggaggcatgtagacccgcagctggtggggccgtgcatacccggggtcttgacttcgcctgcgatatctacatttgggcccctctggctggtacttgcggggtcctgctgctttcactcgtgatcactctttactgtaagcgcggtcggaagaagctgctgtacatctttaagcaacccttcatgaggcctgtgcagactactcaagaggaggacggctgttcatgccggttcccagaggaggaggaaggcggctgcgaactgcgcgtgaaattcagccgcagcgcagatgctccagcctacaagcaggggcagaaccagctctacaacgaactcaatcttggtcggagagaggagtacgacgtgctggacaagcggagaggacgggacccagaaatgggcgggaagccgcgcagaaagaatccccaagagggcctgtacaacgagctccaaaaggataagatggcagaagcctatagcgagattggtatgaaaggggaacgcagaagaggcaaaggccacgacggactgtaccagggactcagcaccgccaccaaggacacctatgacgctcttcacatgcaggccctgccgcctcgg

SEQ ID NO: 521 - DNA, 717 bp, synthetic construct
  misc_feature 1..717: note = source = /note="Description of Artificial Sequence: Synthetic polynucleotide"
  source 1..717: mol_type = other DNA
caagtccagctccagcagtcgggcccagagttggagaagcctggggcgagcgtgaagatctcatgcaaagcctcaggctactcctttactggatacacgatgaattgggtgaaacagtcgcatggaaagtcactggaatggatcggtctgattacgccctacaacggcgcctccagctacaaccagaagttcaggggaaaggcgacccttactgtcgacaagtcgtcaagcaccgcctacatggacctcctgtccctgacctccgaagatagcgcggtctacttttgtgcacgcggaggttacgatggacggggattcgactactggggccagggaaccactgtcaccgtgtcgagcggaggcggagggagcggaggaggaggcagcggaggtggagggtcggatatcgaactcactcagtccccagcaatcatgtccgcttcaccgggagaaaaggtgaccatgacttgctcggcctcctcgtccgtgtcatacatgcactggtaccaacaaaaatcggggacctcccctaagagatggatctacgataccagcaaactggcttcaggcgtgccgggacgcttctcgggttcggggagcggaaattcgtattcgttgaccatttcgtccgtggaagccgaggacgacgcaacttattactgccaacagtggtcaggctacccgctcactttcggagccggcactaagctggagatc

SEQ ID NO: 522 - DNA, 1149 bp, synthetic construct
  misc_feature 1..1149: note = source = /note="Description of Artificial Sequence: Synthetic polynucleotide"
  source 1..1149: mol_type = other DNA
atggccctccctgtcaccgccctgctgcttccgctggctcttctgctccacgccgctcggccccaagtccagctccagcagtcgggcccagagttggagaagcctggggcgagcgtgaagatctcatgcaaagcctcaggctactcctttactggatacacgatgaattgggtgaaacagtcgcatggaaagtcactggaatggatcggtctgattacgccctacaacggcgcctccagctacaaccagaagttcaggggaaaggcgacccttactgtcgacaagtcgtcaagcaccgcctacatggacctcctgtccctgacctccgaagatagcgcggtctacttttgtgcacgcggaggttacgatggacggggattcgactactggggccagggaaccactgtcaccgtgtcgagcggaggcggagggagcggaggaggaggcagcggaggtggagggtcggatatcgaactcactcagtccccagcaatcatgtccgcttcaccgggagaaaaggtgaccatgacttgctcggcctcctcgtccgtgtcatacatgcactggtaccaacaaaaatcggggacctcccctaagagatggatctacgataccagcaaactggcttcaggcgtgccgggacgcttctcgggttcggggagcggaaattcgtattcgttgaccatttcgtccgtggaagccgaggacgacgcaacttattactgccaacagtggtcaggctacccgctcactttcggagccggcactaagctggagatcaccactaccccagcaccgaggccacccaccccggctcctaccatcgcctcccagcctctgtccctgcgtccggaggcatgtagacccgcagctggtggggccgtgcatacccggggtcttgacttcgcctgcgatatctacatttgggcccctctggctggtacttgcggggtcctgctgctttcactcgtgatcactctttactgtaagcgcggtcggaagaagctgctgtacatctttaagcaacccttcatgaggcctgtgcagactactcaagaggaggacggctgttcatgccggttcccagaggaggaggaaggcggctgcgaactgcgcgtgaaattcagccgcagcgcagatgctccagcc

SEQ ID NO: 523-890 - skipped (368 entries)

SEQ ID NO: 891 - protein, 486 aa, synthetic construct
  REGION 1..486: note = source = /note="Description of Artificial Sequence: Synthetic polypeptide"
MALPVTALLLPLALLLHAARPDIQMTQTTSSLSASLGDRVTISCRASQDISKYLNWYQQKPDGTVKLLIYHTSRLHSGVPSRFSGSGSGTDYSLTISNLEQEDIATYFCQQGNTLPYTFGGGTKLEITGGGGSGGGGSGGGGSEVKLQESGPGLVAPSQSLSVTCTVSGVSLPDYGVSWIRQPPRKGLEWLGVIWGSETTYYNSALKSRLTIIKDNSKSQVFLKMNSLQTDDTAIYYCAKHYYYGGSYAMDYWGQGTSVTVSSTTTPAPRPPTPAPTIASQPLSLRPEACRPAAGGAVHTRGLDFACDIYIWAPLAGTCGVLLLSLVITLYCKRGRKKLLYIFKQPFMRPVQTTQEEDGCSCRFPEEEEGGCELRVKFSRSADAPAYKQGQNQLYNELNLGRREEYDVLDKRRGRDPEMGGKPRRKNPQEGLYNELQKDKMAEAYSEIGMKGERRRGKGHDGLYQGLSTATKDTYDALHMQALPPR

SEQ ID NO: 892 - protein, 465 aa, synthetic construct
  REGION 1..465: note = source = /note="Description of Artificial Sequence: Synthetic polypeptide"
DIQMTQTTSSLSASLGDRVTISCRASQDISKYLNWYQQKPDGTVKLLIYHTSRLHSGVPSRFSGSGSGTDYSLTISNLEQEDIATYFCQQGNTLPYTFGGGTKLEITGGGGSGGGGSGGGGSEVKLQESGPGLVAPSQSLSVTCTVSGVSLPDYGVSWIRQPPRKGLEWLGVIWGSETTYYNSALKSRLTIIKDNSKSQVFLKMNSLQTDDTAIYYCAKHYYYGGSYAMDYWGQGTSVTVSSTTTPAPRPPTPAPTIASQPLSLRPEACRPAAGGAVHTRGLDFACDIYIWAPLAGTCGVLLLSLVITLYCKRGRKKLLYIFKQPFMRPVQTTQEEDGCSCRFPEEEEGGCELRVKFSRSADAPAYKQGQNQLYNELNLGRREEYDVLDKRRGRDPEMGGKPRRKNPQEGLYNELQKDKMAEAYSEIGMKGERRRGKGHDGLYQGLSTATKDTYDALHMQALPPR

SEQ ID NO: 893 - protein, 242 aa, synthetic construct
  REGION 1..242: note = source = /note="Description of Artificial Sequence: Synthetic polypeptide"
EIVMTQSPATLSLSPGERATLSCRASQDISKYLNWYQQKPGQAPRLLIYHTSRLHSGIPARFSGSGSGTDYTLTISSLQPEDFAVYFCQQGNTLPYTFGQGTKLEIKGGGGSGGGGSGGGGSQVQLQESGPGLVKPSETLSLTCTVSGVSLPDYGVSWIRQPPGKGLEWIGVIWGSETTYYSSSLKSRVTISKDNSKNQVSLKLSSVTAADTAVYYCAKHYYYGGSYAMDYWGQGTLVTVSS

SEQ ID NO: 894 - DNA, 813 bp, synthetic construct
  misc_feature 1..813: note = source = /note="Description of Artificial Sequence: Synthetic polynucleotide"
  source 1..813: mol_type = other DNA
atggccctccctgtcaccgccctgctgcttccgctggctcttctgctccacgccgctcggcccgaaattgtgatgacccagtcacccgccactcttagcctttcacccggtgagcgcgcaaccctgtcttgcagagcctcccaagacatctcaaaataccttaattggtatcaacagaagcccggacaggctcctcgccttctgatctaccacaccagccggctccattctggaatccctgccaggttcagcggtagcggatctgggaccgactacaccctcactatcagctcactgcagccagaggacttcgctgtctatttctgtcagcaagggaacaccctgccctacacctttggacagggcaccaagctcgagattaaaggtggaggtggcagcggaggaggtgggtccggcggtggaggaagccaggtccaactccaagaaagcggaccgggtcttgtgaagccatcagaaactctttcactgacttgtactgtgagcggagtgtctctccccgattacggggtgtcttggatcagacagccaccggggaagggtctggaatggattggagtgatttggggctctgagactacttactactcttcatccctcaagtcacgcgtcaccatctcaaaggacaactctaagaatcaggtgtcactgaaactgtcatctgtgaccgcagccgacaccgccgtgtactattgcgctaagcattactattatggcgggagctacgcaatggattactggggacagggtactctggtcaccgtgtccagccaccaccatcatcaccatcaccat

SEQ ID NO: 895 - protein, 271 aa, synthetic construct
  REGION 1..271: note = source = /note="Description of Artificial Sequence: Synthetic polypeptide"
MALPVTALLLPLALLLHAARPEIVMTQSPATLSLSPGERATLSCRASQDISKYLNWYQQKPGQAPRLLIYHTSRLHSGIPARFSGSGSGTDYTLTISSLQPEDFAVYFCQQGNTLPYTFGQGTKLEIKGGGGSGGGGSGGGGSQVQLQESGPGLVKPSETLSLTCTVSGVSLPDYGVSWIRQPPGKGLEWIGVIWGSETTYYSSSLKSRVTISKDNSKNQVSLKLSSVTAADTAVYYCAKHYYYGGSYAMDYWGQGTLVTVSSHHHHHHHH

SEQ ID NO: 896 - DNA, 1458 bp, synthetic construct
  misc_feature 1..1458: note = source = /note="Description of Artificial Sequence: Synthetic polynucleotide"
  source 1..1458: mol_type = other DNA
atggccctccctgtcaccgccctgctgcttccgctggctcttctgctccacgccgctcggcccgaaattgtgatgacccagtcacccgccactcttagcctttcacccggtgagcgcgcaaccctgtcttgcagagcctcccaagacatctcaaaataccttaattggtatcaacagaagcccggacaggctcctcgccttctgatctaccacaccagccggctccattctggaatccctgccaggttcagcggtagcggatctgggaccgactacaccctcactatcagctcactgcagccagaggacttcgctgtctatttctgtcagcaagggaacaccctgccctacacctttggacagggcaccaagctcgagattaaaggtggaggtggcagcggaggaggtgggtccggcggtggaggaagccaggtccaactccaagaaagcggaccgggtcttgtgaagccatcagaaactctttcactgacttgtactgtgagcggagtgtctctccccgattacggggtgtcttggatcagacagccaccggggaagggtctggaatggattggagtgatttggggctctgagactacttactactcttcatccctcaagtcacgcgtcaccatctcaaaggacaactctaagaatcaggtgtcactgaaactgtcatctgtgaccgcagccgacaccgccgtgtactattgcgctaagcattactattatggcgggagctacgcaatggattactggggacagggtactctggtcaccgtgtccagcaccactaccccagcaccgaggccacccaccccggctcctaccatcgcctcccagcctctgtccctgcgtccggaggcatgtagacccgcagctggtggggccgtgcatacccggggtcttgacttcgcctgcgatatctacatttgggcccctctggctggtacttgcggggtcctgctgctttcactcgtgatcactctttactgtaagcgcggtcggaagaagctgctgtacatctttaagcaacccttcatgaggcctgtgcagactactcaagaggaggacggctgttcatgccggttcccagaggaggaggaaggcggctgcgaactgcgcgtgaaattcagccgcagcgcagatgctccagcctacaagcaggggcagaaccagctctacaacgaactcaatcttggtcggagagaggagtacgacgtgctggacaagcggagaggacgggacccagaaatgggcgggaagccgcgcagaaagaatccccaagagggcctgtacaacgagctccaaaaggataagatggcagaagcctatagcgagattggtatgaaaggggaacgcagaagaggcaaaggccacgacggactgtaccagggactcagcaccgccaccaaggacacctatgacgctcttcacatgcaggccctgccgcctcgg

SEQ ID NO: 897 - protein, 486 aa, synthetic construct
  REGION 1..486: note = source = /note="Description of Artificial Sequence: Synthetic polypeptide"
MALPVTALLLPLALLLHAARPEIVMTQSPATLSLSPGERATLSCRASQDISKYLNWYQQKPGQAPRLLIYHTSRLHSGIPARFSGSGSGTDYTLTISSLQPEDFAVYFCQQGNTLPYTFGQGTKLEIKGGGGSGGGGSGGGGSQVQLQESGPGLVKPSETLSLTCTVSGVSLPDYGVSWIRQPPGKGLEWIGVIWGSETTYYSSSLKSRVTISKDNSKNQVSLKLSSVTAADTAVYYCAKHYYYGGSYAMDYWGQGTLVTVSSTTTPAPRPPTPAPTIASQPLSLRPEACRPAAGGAVHTRGLDFACDIYIWAPLAGTCGVLLLSLVITLYCKRGRKKLLYIFKQPFMRPVQTTQEEDGCSCRFPEEEEGGCELRVKFSRSADAPAYKQGQNQLYNELNLGRREEYDVLDKRRGRDPEMGGKPRRKNPQEGLYNELQKDKMAEAYSEIGMKGERRRGKGHDGLYQGLSTATKDTYDALHMQALPPR

SEQ ID NO: 898 - protein, 242 aa, synthetic construct
  REGION 1..242: note = source = /note="Description of Artificial Sequence: Synthetic polypeptide"
EIVMTQSPATLSLSPGERATLSCRASQDISKYLNWYQQKPGQAPRLLIYHTSRLHSGIPARFSGSGSGTDYTLTISSLQPEDFAVYFCQQGNTLPYTFGQGTKLEIKGGGGSGGGGSGGGGSQVQLQESGPGLVKPSETLSLTCTVSGVSLPDYGVSWIRQPPGKGLEWIGVIWGSETTYYQSSLKSRVTISKDNSKNQVSLKLSSVTAADTAVYYCAKHYYYGGSYAMDYWGQGTLVTVSS

SEQ ID NO: 899 - DNA, 813 bp, synthetic construct
  misc_feature 1..813: note = source = /note="Description of Artificial Sequence: Synthetic polynucleotide"
  source 1..813: mol_type = other DNA
atggccctccctgtcaccgccctgctgcttccgctggctcttctgctccacgccgctcggcccgaaattgtgatgacccagtcacccgccactcttagcctttcacccggtgagcgcgcaaccctgtcttgcagagcctcccaagacatctcaaaataccttaattggtatcaacagaagcccggacaggctcctcgccttctgatctaccacaccagccggctccattctggaatccctgccaggttcagcggtagcggatctgggaccgactacaccctcactatcagctcactgcagccagaggacttcgctgtctatttctgtcagcaagggaacaccctgccctacacctttggacagggcaccaagctcgagattaaaggtggaggtggcagcggaggaggtgggtccggcggtggaggaagccaggtccaactccaagaaagcggaccgggtcttgtgaagccatcagaaactctttcactgacttgtactgtgagcggagtgtctctccccgattacggggtgtcttggatcagacagccaccggggaagggtctggaatggattggagtgatttggggctctgagactacttactaccaatcatccctcaagtcacgcgtcaccatctcaaaggacaactctaagaatcaggtgtcactgaaactgtcatctgtgaccgcagccgacaccgccgtgtactattgcgctaagcattactattatggcgggagctacgcaatggattactggggacagggtactctggtcaccgtgtccagccaccaccatcatcaccatcaccat

SEQ ID NO: 900 - protein, 271 aa, synthetic construct
  REGION 1..271: note = source = /note="Description of Artificial Sequence: Synthetic polypeptide"
MALPVTALLLPLALLLHAARPEIVMTQSPATLSLSPGERATLSCRASQDISKYLNWYQQKPGQAPRLLIYHTSRLHSGIPARFSGSGSGTDYTLTISSLQPEDFAVYFCQQGNTLPYTFGQGTKLEIKGGGGSGGGGSGGGGSQVQLQESGPGLVKPSETLSLTCTVSGVSLPDYGVSWIRQPPGKGLEWIGVIWGSETTYYQSSLKSRVTISKDNSKNQVSLKLSSVTAADTAVYYCAKHYYYGGSYAMDYWGQGTLVTVSSHHHHHHHH

SEQ ID NO: 901 - DNA, 1458 bp, synthetic construct
  misc_feature 1..1458: note = source = /note="Description of Artificial Sequence: Synthetic polynucleotide"
  source 1..1458: mol_type = other DNA
atggccctccctgtcaccgccctgctgcttccgctggctcttctgctccacgccgctcggcccgaaattgtgatgacccagtcacccgccactcttagcctttcacccggtgagcgcgcaaccctgtcttgcagagcctcccaagacatctcaaaataccttaattggtatcaacagaagcccggacaggctcctcgccttctgatctaccacaccagccggctccattctggaatccctgccaggttcagcggtagcggatctgggaccgactacaccctcactatcagctcactgcagccagaggacttcgctgtctatttctgtcagcaagggaacaccctgccctacacctttggacagggcaccaagctcgagattaaaggtggaggtggcagcggaggaggtgggtccggcggtggaggaagccaggtccaactccaagaaagcggaccgggtcttgtgaagccatcagaaactctttcactgacttgtactgtgagcggagtgtctctccccgattacggggtgtcttggatcagacagccaccggggaagggtctggaatggattggagtgatttggggctctgagactacttactaccaatcatccctcaagtcacgcgtcaccatctcaaaggacaactctaagaatcaggtgtcactgaaactgtcatctgtgaccgcagccgacaccgccgtgtactattgcgctaagcattactattatggcgggagctacgcaatggattactggggacagggtactctggtcaccgtgtccagcaccactaccccagcaccgaggccacccaccccggctcctaccatcgcctcccagcctctgtccctgcgtccggaggcatgtagacccgcagctggtggggccgtgcatacccggggtcttgacttcgcctgcgatatctacatttgggcccctctggctggtacttgcggggtcctgctgctttcactcgtgatcactctttactgtaagcgcggtcggaagaagctgctgtacatctttaagcaacccttcatgaggcctgtgcagactactcaagaggaggacggctgttcatgccggttcccagaggaggaggaaggcggctgcgaactgcgcgtgaaattcagccgcagcgcagatgctccagcctacaagcaggggcagaaccagctctacaacgaactcaatcttggtcggagagaggagtacgacgtgctggacaagcggagaggacgggacccagaaatgggcgggaagccgcgcagaaagaatccccaagagggcctgtacaacgagctccaaaaggataagatggcagaagcctatagcgagattggtatgaaaggggaacgcagaagaggcaaaggccacgacggactgtaccagggactcagcaccgccaccaaggacacctatgacgctcttcacatgcaggccctgccgcctcgg

SEQ ID NO: 902 - protein, 486 aa, synthetic construct
  REGION 1..486: note = source = /note="Description of Artificial Sequence: Synthetic polypeptide"
MALPVTALLLPLALLLHAARPEIVMTQSPATLSLSPGERATLSCRASQDISKYLNWYQQKPGQAPRLLIYHTSRLHSGIPARFSGSGSGTDYTLTISSLQPEDFAVYFCQQGNTLPYTFGQGTKLEIKGGGGSGGGGSGGGGSQVQLQESGPGLVKPSETLSLTCTVSGVSLPDYGVSWIRQPPGKGLEWIGVIWGSETTYYQSSLKSRVTISKDNSKNQVSLKLSSVTAADTAVYYCAKHYYYGGSYAMDYWGQGTLVTVSSTTTPAPRPPTPAPTIASQPLSLRPEACRPAAGGAVHTRGLDFACDIYIWAPLAGTCGVLLLSLVITLYCKRGRKKLLYIFKQPFMRPVQTTQEEDGCSCRFPEEEEGGCELRVKFSRSADAPAYKQGQNQLYNELNLGRREEYDVLDKRRGRDPEMGGKPRRKNPQEGLYNELQKDKMAEAYSEIGMKGERRRGKGHDGLYQGLSTATKDTYDALHMQALPPR

SEQ ID NO: 903 - protein, 242 aa, synthetic construct
  REGION 1..242: note = source = /note="Description of Artificial Sequence: Synthetic polypeptide"
QVQLQESGPGLVKPSETLSLTCTVSGVSLPDYGVSWIRQPPGKGLEWIGVIWGSETTYYSSSLKSRVTISKDNSKNQVSLKLSSVTAADTAVYYCAKHYYYGGSYAMDYWGQGTLVTVSSGGGGSGGGGSGGGGSEIVMTQSPATLSLSPGERATLSCRASQDISKYLNWYQQKPGQAPRLLIYHTSRLHSGIPARFSGSGSGTDYTLTISSLQPEDFAVYFCQQGNTLPYTFGQGTKLEIK

SEQ ID NO: 904 - DNA, 813 bp, synthetic construct
  misc_feature 1..813: note = source = /note="Description of Artificial Sequence: Synthetic polynucleotide"
  source 1..813: mol_type = other DNA
atggctctgcccgtgaccgcactcctcctgccactggctctgctgcttcacgccgctcgcccacaagtccagcttcaagaatcagggcctggtctggtgaagccatctgagactctgtccctcacttgcaccgtgagcggagtgtccctcccagactacggagtgagctggattagacagcctcccggaaagggactggagtggatcggagtgatttggggtagcgaaaccacttactattcatcttccctgaagtcacgggtcaccatttcaaaggataactcaaagaatcaagtgagcctcaagctctcatcagtcaccgccgctgacaccgccgtgtattactgtgccaagcattactactatggagggtcctacgccatggactactggggccagggaactctggtcactgtgtcatctggtggaggaggtagcggaggaggcgggagcggtggaggtggctccgaaatcgtgatgacccagagccctgcaaccctgtccctttctcccggggaacgggctaccctttcttgtcgggcatcacaagatatctcaaaatacctcaattggtatcaacagaagccgggacaggcccctaggcttcttatctaccacacctctcgcctgcatagcgggattcccgcacgctttagcgggtctggaagcgggaccgactacactctgaccatctcatctctccagcccgaggacttcgccgtctacttctgccagcagggtaacaccctgccgtacaccttcggccagggcaccaagcttgagatcaaacatcaccaccatcatcaccatcac

SEQ ID NO: 905 - protein, 271 aa, synthetic construct
  REGION 1..271: note = source = /note="Description of Artificial Sequence: Synthetic polypeptide"
MALPVTALLLPLALLLHAARPQVQLQESGPGLVKPSETLSLTCTVSGVSLPDYGVSWIRQPPGKGLEWIGVIWGSETTYYSSSLKSRVTISKDNSKNQVSLKLSSVTAADTAVYYCAKHYYYGGSYAMDYWGQGTLVTVSSGGGGSGGGGSGGGGSEIVMTQSPATLSLSPGERATLSCRASQDISKYLNWYQQKPGQAPRLLIYHTSRLHSGIPARFSGSGSGTDYTLTISSLQPEDFAVYFCQQGNTLPYTFGQGTKLEIKHHHHHHHH

SEQ ID NO: 906 - DNA, 1458 bp, synthetic construct
  misc_feature 1..1458: note = source = /note="Description of Artificial Sequence: Synthetic polynucleotide"
  source 1..1458: mol_type = other DNA
atggctctgcccgtgaccgcactcctcctgccactggctctgctgcttcacgccgctcgcccacaagtccagcttcaagaatcagggcctggtctggtgaagccatctgagactctgtccctcacttgcaccgtgagcggagtgtccctcccagactacggagtgagctggattagacagcctcccggaaagggactggagtggatcggagtgatttggggtagcgaaaccacttactattcatcttccctgaagtcacgggtcaccatttcaaaggataactcaaagaatcaagtgagcctcaagctctcatcagtcaccgccgctgacaccgccgtgtattactgtgccaagcattactactatggagggtcctacgccatggactactggggccagggaactctggtcactgtgtcatctggtggaggaggtagcggaggaggcgggagcggtggaggtggctccgaaatcgtgatgacccagagccctgcaaccctgtccctttctcccggggaacgggctaccctttcttgtcgggcatcacaagatatctcaaaatacctcaattggtatcaacagaagccgggacaggcccctaggcttcttatctaccacacctctcgcctgcatagcgggattcccgcacgctttagcgggtctggaagcgggaccgactacactctgaccatctcatctctccagcccgaggacttcgccgtctacttctgccagcagggtaacaccctgccgtacaccttcggccagggcaccaagcttgagatcaaaaccactactcccgctccaaggccacccacccctgccccgaccatcgcctctcagccgctttccctgcgtccggaggcatgtagacccgcagctggtggggccgtgcatacccggggtcttgacttcgcctgcgatatctacatttgggcccctctggctggtacttgcggggtcctgctgctttcactcgtgatcactctttactgtaagcgcggtcggaagaagctgctgtacatctttaagcaacccttcatgaggcctgtgcagactactcaagaggaggacggctgttcatgccggttcccagaggaggaggaaggcggctgcgaactgcgcgtgaaattcagccgcagcgcagatgctccagcctacaagcaggggcagaaccagctctacaacgaactcaatcttggtcggagagaggagtacgacgtgctggacaagcggagaggacgggacccagaaatgggcgggaagccgcgcagaaagaatccccaagagggcctgtacaacgagctccaaaaggataagatggcagaagcctatagcgagattggtatgaaaggggaacgcagaagaggcaaaggccacgacggactgtaccagggactcagcaccgccaccaaggacacctatgacgctcttcacatgcaggccctgccgcctcgg

SEQ ID NO: 907 - protein, 486 aa, synthetic construct
  REGION 1..486: note = source = /note="Description of Artificial Sequence: Synthetic polypeptide"
MALPVTALLLPLALLLHAARPQVQLQESGPGLVKPSETLSLTCTVSGVSLPDYGVSWIRQPPGKGLEWIGVIWGSETTYYSSSLKSRVTISKDNSKNQVSLKLSSVTAADTAVYYCAKHYYYGGSYAMDYWGQGTLVTVSSGGGGSGGGGSGGGGSEIVMTQSPATLSLSPGERATLSCRASQDISKYLNWYQQKPGQAPRLLIYHTSRLHSGIPARFSGSGSGTDYTLTISSLQPEDFAVYFCQQGNTLPYTFGQGTKLEIKTTTPAPRPPTPAPTIASQPLSLRPEACRPAAGGAVHTRGLDFACDIYIWAPLAGTCGVLLLSLVITLYCKRGRKKLLYIFKQPFMRPVQTTQEEDGCSCRFPEEEEGGCELRVKFSRSADAPAYKQGQNQLYNELNLGRREEYDVLDKRRGRDPEMGGKPRRKNPQEGLYNELQKDKMAEAYSEIGMKGERRRGKGHDGLYQGLSTATKDTYDALHMQALPPR

SEQ ID NO: 908 - protein, 242 aa, synthetic construct
  REGION 1..242: note = source = /note="Description of Artificial Sequence: Synthetic polypeptide"
QVQLQESGPGLVKPSETLSLTCTVSGVSLPDYGVSWIRQPPGKGLEWIGVIWGSETTYYQSSLKSRVTISKDNSKNQVSLKLSSVTAADTAVYYCAKHYYYGGSYAMDYWGQGTLVTVSSGGGGSGGGGSGGGGSEIVMTQSPATLSLSPGERATLSCRASQDISKYLNWYQQKPGQAPRLLIYHTSRLHSGIPARFSGSGSGTDYTLTISSLQPEDFAVYFCQQGNTLPYTFGQGTKLEIK

SEQ ID NO: 909 - DNA, 813 bp, synthetic construct
  misc_feature 1..813: note = source = /note="Description of Artificial Sequence: Synthetic polynucleotide"
  source 1..813: mol_type = other DNA
atggctctgcccgtgaccgcactcctcctgccactggctctgctgcttcacgccgctcgcccacaagtccagcttcaagaatcagggcctggtctggtgaagccatctgagactctgtccctcacttgcaccgtgagcggagtgtccctcccagactacggagtgagctggattagacagcctcccggaaagggactggagtggatcggagtgatttggggtagcgaaaccacttactatcaatcttccctgaagtcacgggtcaccatttcaaaggataactcaaagaatcaagtgagcctcaagctctcatcagtcaccgccgctgacaccgccgtgtattactgtgccaagcattactactatggagggtcctacgccatggactactggggccagggaactctggtcactgtgtcatctggtggaggaggtagcggaggaggcgggagcggtggaggtggctccgaaatcgtgatgacccagagccctgcaaccctgtccctttctcccggggaacgggctaccctttcttgtcgggcatcacaagatatctcaaaatacctcaattggtatcaacagaagccgggacaggcccctaggcttcttatctaccacacctctcgcctgcatagcgggattcccgcacgctttagcgggtctggaagcgggaccgactacactctgaccatctcatctctccagcccgaggacttcgccgtctacttctgccagcagggtaacaccctgccgtacaccttcggccagggcaccaagcttgagatcaaacatcaccaccatcatcaccatcac

SEQ ID NO: 910 - protein, 271 aa, synthetic construct
  REGION 1..271: note = source = /note="Description of Artificial Sequence: Synthetic polypeptide"
MALPVTALLLPLALLLHAARPQVQLQESGPGLVKPSETLSLTCTVSGVSLPDYGVSWIRQPPGKGLEWIGVIWGSETTYYQSSLKSRVTISKDNSKNQVSLKLSSVTAADTAVYYCAKHYYYGGSYAMDYWGQGTLVTVSSGGGGSGGGGSGGGGSEIVMTQSPATLSLSPGERATLSCRASQDISKYLNWYQQKPGQAPRLLIYHTSRLHSGIPARFSGSGSGTDYTLTISSLQPEDFAVYFCQQGNTLPYTFGQGTKLEIKHHHHHHHH

SEQ ID NO: 911 - DNA, 1458 bp, synthetic construct
  misc_feature 1..1458: note = source = /note="Description of Artificial Sequence: Synthetic polynucleotide"
  source 1..1458: mol_type = other DNA
atggctctgcccgtgaccgcactcctcctgccactggctctgctgcttcacgccgctcgcccacaagtccagcttcaagaatcagggcctggtctggtgaagccatctgagactctgtccctcacttgcaccgtgagcggagtgtccctcccagactacggagtgagctggattagacagcctcccggaaagggactggagtggatcggagtgatttggggtagcgaaaccacttactatcaatcttccctgaagtcacgggtcaccatttcaaaggataactcaaagaatcaagtgagcctcaagctctcatcagtcaccgccgctgacaccgccgtgtattactgtgccaagcattactactatggagggtcctacgccatggactactggggccagggaactctggtcactgtgtcatctggtggaggaggtagcggaggaggcgggagcggtggaggtggctccgaaatcgtgatgacccagagccctgcaaccctgtccctttctcccggggaacgggctaccctttcttgtcgggcatcacaagatatctcaaaatacctcaattggtatcaacagaagccgggacaggcccctaggcttcttatctaccacacctctcgcctgcatagcgggattcccgcacgctttagcgggtctggaagcgggaccgactacactctgaccatctcatctctccagcccgaggacttcgccgtctacttctgccagcagggtaacaccctgccgtacaccttcggccagggcaccaagcttgagatcaaaaccactactcccgctccaaggccacccacccctgccccgaccatcgcctctcagccgctttccctgcgtccggaggcatgtagacccgcagctggtggggccgtgcatacccggggtcttgacttcgcctgcgatatctacatttgggcccctctggctggtacttgcggggtcctgctgctttcactcgtgatcactctttactgtaagcgcggtcggaagaagctgctgtacatctttaagcaacccttcatgaggcctgtgcagactactcaagaggaggacggctgttcatgccggttcccagaggaggaggaaggcggctgcgaactgcgcgtgaaattcagccgcagcgcagatgctccagcctacaagcaggggcagaaccagctctacaacgaactcaatcttggtcggagagaggagtacgacgtgctggacaagcggagaggacgggacccagaaatgggcgggaagccgcgcagaaagaatccccaagagggcctgtacaacgagctccaaaaggataagatggcagaagcctatagcgagattggtatgaaaggggaacgcagaagaggcaaaggccacgacggactgtaccagggactcagcaccgccaccaaggacacctatgacgctcttcacatgcaggccctgccgcctcgg

SEQ ID NO: 912 - protein, 486 aa, synthetic construct
  REGION 1..486: note = source = /note="Description of Artificial Sequence: Synthetic polypeptide"
MALPVTALLLPLALLLHAARPQVQLQESGPGLVKPSETLSLTCTVSGVSLPDYGVSWIRQPPGKGLEWIGVIWGSETTYYQSSLKSRVTISKDNSKNQVSLKLSSVTAADTAVYYCAKHYYYGGSYAMDYWGQGTLVTVSSGGGGSGGGGSGGGGSEIVMTQSPATLSLSPGERATLSCRASQDISKYLNWYQQKPGQAPRLLIYHTSRLHSGIPARFSGSGSGTDYTLTISSLQPEDFAVYFCQQGNTLPYTFGQGTKLEIKTTTPAPRPPTPAPTIASQPLSLRPEACRPAAGGAVHTRGLDFACDIYIWAPLAGTCGVLLLSLVITLYCKRGRKKLLYIFKQPFMRPVQTTQEEDGCSCRFPEEEEGGCELRVKFSRSADAPAYKQGQNQLYNELNLGRREEYDVLDKRRGRDPEMGGKPRRKNPQEGLYNELQKDKMAEAYSEIGMKGERRRGKGHDGLYQGLSTATKDTYDALHMQALPPR

SEQ ID NO: 913 - protein, 247 aa, synthetic construct
  REGION 1..247: note = source = /note="Description of Artificial Sequence: Synthetic polypeptide"
EIVMTQSPATLSLSPGERATLSCRASQDISKYLNWYQQKPGQAPRLLIYHTSRLHSGIPARFSGSGSGTDYTLTISSLQPEDFAVYFCQQGNTLPYTFGQGTKLEIKGGGGSGGGGSGGGGSGGGGSQVQLQESGPGLVKPSETLSLTCTVSGVSLPDYGVSWIRQPPGKGLEWIGVIWGSETTYYSSSLKSRVTISKDNSKNQVSLKLSSVTAADTAVYYCAKHYYYGGSYAMDYWGQGTLVTVSS

SEQ ID NO: 914 - DNA, 828 bp, synthetic construct
  misc_feature 1..828: note = source = /note="Description of Artificial Sequence: Synthetic polynucleotide"
  source 1..828: mol_type = other DNA
atggccctcccagtgaccgctctgctgctgcctctcgcacttcttctccatgccgctcggcctgagatcgtcatgacccaaagccccgctaccctgtccctgtcacccggcgagagggcaaccctttcatgcagggccagccaggacatttctaagtacctcaactggtatcagcagaagccagggcaggctcctcgcctgctgatctaccacaccagccgcctccacagcggtatccccgccagattttccgggagcgggtctggaaccgactacaccctcaccatctcttctctgcagcccgaggatttcgccgtctatttctgccagcaggggaatactctgccgtacaccttcggtcaaggtaccaagctggaaatcaagggaggcggaggatcaggcggtggcggaagcggaggaggtggctccggaggaggaggttcccaagtgcagcttcaagaatcaggacccggacttgtgaagccatcagaaaccctctccctgacttgtaccgtgtccggtgtgagcctccccgactacggagtctcttggattcgccagcctccggggaagggtcttgaatggattggggtgatttggggatcagagactacttactactcttcatcacttaagtcacgggtcaccatcagcaaagataatagcaagaaccaagtgtcacttaagctgtcatctgtgaccgccgctgacaccgccgtgtactattgtgccaaacattactattacggagggtcttatgctatggactactggggacaggggaccctggtgactgtctctagccatcaccatcaccaccatcatcac

SEQ ID NO: 915 - protein, 276 aa, synthetic construct
  REGION 1..276: note = source = /note="Description of Artificial Sequence: Synthetic polypeptide"
MALPVTALLLPLALLLHAARPEIVMTQSPATLSLSPGERATLSCRASQDISKYLNWYQQKPGQAPRLLIYHTSRLHSGIPARFSGSGSGTDYTLTISSLQPEDFAVYFCQQGNTLPYTFGQGTKLEIKGGGGSGGGGSGGGGSGGGGSQVQLQESGPGLVKPSETLSLTCTVSGVSLPDYGVSWIRQPPGKGLEWIGVIWGSETTYYSSSLKSRVTISKDNSKNQVSLKLSSVTAADTAVYYCAKHYYYGGSYAMDYWGQGTLVTVSSHHHHHHHH

SEQ ID NO: 916 - DNA, 1473 bp, synthetic construct
  misc_feature 1..1473: note = source = /note="Description of Artificial Sequence: Synthetic polynucleotide"
  source 1..1473: mol_type = other DNA
atggccctccctgtcaccgccctgctgcttccgctggctcttctgctccacgccgctcggcccgaaattgtgatgacccagtcacccgccactcttagcctttcacccggtgagcgcgcaaccctgtcttgcagagcctcccaagacatctcaaaataccttaattggtatcaacagaagcccggacaggctcctcgccttctgatctaccacaccagccggctccattctggaatccctgccaggttcagcggtagcggatctgggaccgactacaccctcactatcagctcactgcagccagaggacttcgctgtctatttctgtcagcaagggaacaccctgccctacacctttggacagggcaccaagctcgagattaaaggtggaggtggcagcggaggaggtgggtccggcggtggaggaagcggcggaggcgggagccaggtccaactccaagaaagcggaccgggtcttgtgaagccatcagaaactctttcactgacttgtactgtgagcggagtgtctctccccgattacggggtgtcttggatcagacagccaccggggaagggtctggaatggattggagtgatttggggctctgagactacttactactcttcatccctcaagtcacgcgtcaccatctcaaaggacaactctaagaatcaggtgtcactgaaactgtcatctgtgaccgcagccgacaccgccgtgtactattgcgctaagcattactattatggcgggagctacgcaatggattactggggacagggtactctggtcaccgtgtccagcaccactaccccagcaccgaggccacccaccccggctcctaccatcgcctcccagcctctgtccctgcgtccggaggcatgtagacccgcagctggtggggccgtgcatacccggggtcttgacttcgcctgcgatatctacatttgggcccctctggctggtacttgcggggtcctgctgctttcactcgtgatcactctttactgtaagcgcggtcggaagaagctgctgtacatctttaagcaacccttcatgaggcctgtgcagactactcaagaggaggacggctgttcatgccggttcccagaggaggaggaaggcggctgcgaactgcgcgtgaaattcagccgcagcgcagatgctccagcctacaagcaggggcagaaccagctctacaacgaactcaatcttggtcggagagaggagtacgacgtgctggacaagcggagaggacgggacccagaaatgggcgggaagccgcgcagaaagaatccccaagagggcctgtacaacgagctccaaaaggataagatggcagaagcctatagcgagattggtatgaaaggggaacgcagaagaggcaaaggccacgacggactgtaccagggactcagcaccgccaccaaggacacctatgacgctcttcacatgcaggccctgccgcctcgg

SEQ ID NO: 917 - protein, 491 aa, synthetic construct
  REGION 1..491: note = source = /note="Description of Artificial Sequence: Synthetic polypeptide"
MALPVTALLLPLALLLHAARPEIVMTQSPATLSLSPGERATLSCRASQDISKYLNWYQQKPGQAPRLLIYHTSRLHSGIPARFSGSGSGTDYTLTISSLQPEDFAVYFCQQGNTLPYTFGQGTKLEIKGGGGSGGGGSGGGGSGGGGSQVQLQESGPGLVKPSETLSLTCTVSGVSLPDYGVSWIRQPPGKGLEWIGVIWGSETTYYSSSLKSRVTISKDNSKNQVSLKLSSVTAADTAVYYCAKHYYYGGSYAMDYWGQGTLVTVSSTTTPAPRPPTPAPTIASQPLSLRPEACRPAAGGAVHTRGLDFACDIYIWAPLAGTCGVLLLSLVITLYCKRGRKKLLYIFKQPFMRPVQTTQEEDGCSCRFPEEEEGGCELRVKFSRSADAPAYKQGQNQLYNELNLGRREEYDVLDKRRGRDPEMGGKPRRKNPQEGLYNELQKDKMAEAYSEIGMKGERRRGKGHDGLYQGLSTATKDTYDALHMQALPPR

SEQ ID NO: 918 - protein, 247 aa, synthetic construct
  REGION 1..247: note = source = /note="Description of Artificial Sequence: Synthetic polypeptide"
EIVMTQSPATLSLSPGERATLSCRASQDISKYLNWYQQKPGQAPRLLIYHTSRLHSGIPARFSGSGSGTDYTLTISSLQPEDFAVYFCQQGNTLPYTFGQGTKLEIKGGGGSGGGGSGGGGSGGGGSQVQLQESGPGLVKPSETLSLTCTVSGVSLPDYGVSWIRQPPGKGLEWIGVIWGSETTYYQSSLKSRVTISKDNSKNQVSLKLSSVTAADTAVYYCAKHYYYGGSYAMDYWGQGTLVTVSS

SEQ ID NO: 919 - DNA, 828 bp, synthetic construct
  misc_feature 1..828: note = source = /note="Description of Artificial Sequence: Synthetic polynucleotide"
  source 1..828: mol_type = other DNA
atggccctcccagtgaccgctctgctgctgcctctcgcacttcttctccatgccgctcggcctgagatcgtcatgacccaaagccccgctaccctgtccctgtcacccggcgagagggcaaccctttcatgcagggccagccaggacatttctaagtacctcaactggtatcagcagaagccagggcaggctcctcgcctgctgatctaccacaccagccgcctccacagcggtatccccgccagattttccgggagcgggtctggaaccgactacaccctcaccatctcttctctgcagcccgaggatttcgccgtctatttctgccagcaggggaatactctgccgtacaccttcggtcaaggtaccaagctggaaatcaagggaggcggaggatcaggcggtggcggaagcggaggaggtggctccggaggaggaggttcccaagtgcagcttcaagaatcaggacccggacttgtgaagccatcagaaaccctctccctgacttgtaccgtgtccggtgtgagcctccccgactacggagtctcttggattcgccagcctccggggaagggtcttgaatggattggggtgatttggggatcagagactacttactaccagtcatcacttaagtcacgggtcaccatcagcaaagataatagcaagaaccaagtgtcacttaagctgtcatctgtgaccgccgctgacaccgccgtgtactattgtgccaaacattactattacggagggtcttatgctatggactactggggacaggggaccctggtgactgtctctagccatcaccatcaccaccatcatcac

SEQ ID NO: 920 - protein, 276 aa, synthetic construct
  REGION 1..276: note = source = /note="Description of Artificial Sequence: Synthetic polypeptide"
MALPVTALLLPLALLLHAARPEIVMTQSPATLSLSPGERATLSCRASQDISKYLNWYQQKPGQAPRLLIYHTSRLHSGIPARFSGSGSGTDYTLTISSLQPEDFAVYFCQQGNTLPYTFGQGTKLEIKGGGGSGGGGSGGGGSGGGGSQVQLQESGPGLVKPSETLSLTCTVSGVSLPDYGVSWIRQPPGKGLEWIGVIWGSETTYYQSSLKSRVTISKDNSKNQVSLKLSSVTAADTAVYYCAKHYYYGGSYAMDYWGQGTLVTVSSHHHHHHHH

SEQ ID NO: 921 - DNA, 1473 bp, synthetic construct
  misc_feature 1..1473: note = source = /note="Description of Artificial Sequence: Synthetic polynucleotide"
  source 1..1473: mol_type = other DNA
atggccctccctgtcaccgccctgctgcttccgctggctcttctgctccacgccgctcggcccgaaattgtgatgacccagtcacccgccactcttagcctttcacccggtgagcgcgcaaccctgtcttgcagagcctcccaagacatctcaaaataccttaattggtatcaacagaagcccggacaggctcctcgccttctgatctaccacaccagccggctccattctggaatccctgccaggttcagcggtagcggatctgggaccgactacaccctcactatcagctcactgcagccagaggacttcgctgtctatttctgtcagcaagggaacaccctgccctacacctttggacagggcaccaagctcgagattaaaggtggaggtggcagcggaggaggtgggtccggcggtggaggaagcggaggcggagggagccaggtccaactccaagaaagcggaccgggtcttgtgaagccatcagaaactctttcactgacttgtactgtgagcggagtgtctctccccgattacggggtgtcttggatcagacagccaccggggaagggtctggaatggattggagtgatttggggctctgagactacttactaccaatcatccctcaagtcacgcgtcaccatctcaaaggacaactctaagaatcaggtgtcactgaaactgtcatctgtgaccgcagccgacaccgccgtgtactattgcgctaagcattactattatggcgggagctacgcaatggattactggggacagggtactctggtcaccgtgtccagcaccactaccccagcaccgaggccacccaccccggctcctaccatcgcctcccagcctctgtccctgcgtccggaggcatgtagacccgcagctggtggggccgtgcatacccggggtcttgacttcgcctgcgatatctacatttgggcccctctggctggtacttgcggggtcctgctgctttcactcgtgatcactctttactgtaagcgcggtcggaagaagctgctgtacatctttaagcaacccttcatgaggcctgtgcagactactcaagaggaggacggctgttcatgccggttcccagaggaggaggaaggcggctgcgaactgcgcgtgaaattcagccgcagcgcagatgctccagcctacaagcaggggcagaaccagctctacaacgaactcaatcttggtcggagagaggagtacgacgtgctggacaagcggagaggacgggacccagaaatgggcgggaagccgcgcagaaagaatccccaagagggcctgtacaacgagctccaaaaggataagatggcagaagcctatagcgagattggtatgaaaggggaacgcagaagaggcaaaggccacgacggactgtaccagggactcagcaccgccaccaaggacacctatgacgctcttcacatgcaggccctgccgcctcgg

SEQ ID NO: 922 - protein, 491 aa, synthetic construct
  REGION 1..491: note = source = /note="Description of Artificial Sequence: Synthetic polypeptide"
MALPVTALLLPLALLLHAARPEIVMTQSPATLSLSPGERATLSCRASQDISKYLNWYQQKPGQAPRLLIYHTSRLHSGIPARFSGSGSGTDYTLTISSLQPEDFAVYFCQQGNTLPYTFGQGTKLEIKGGGGSGGGGSGGGGSGGGGSQVQLQESGPGLVKPSETLSLTCTVSGVSLPDYGVSWIRQPPGKGLEWIGVIWGSETTYYQSSLKSRVTISKDNSKNQVSLKLSSVTAADTAVYYCAKHYYYGGSYAMDYWGQGTLVTVSSTTTPAPRPPTPAPTIASQPLSLRPEACRPAAGGAVHTRGLDFACDIYIWAPLAGTCGVLLLSLVITLYCKRGRKKLLYIFKQPFMRPVQTTQEEDGCSCRFPEEEEGGCELRVKFSRSADAPAYKQGQNQLYNELNLGRREEYDVLDKRRGRDPEMGGKPRRKNPQEGLYNELQKDKMAEAYSEIGMKGERRRGKGHDGLYQGLSTATKDTYDALHMQALPPR

SEQ ID NO: 923 - protein, 247 aa, synthetic construct
  REGION 1..247: note = source = /note="Description of Artificial Sequence: Synthetic polypeptide"
QVQLQESGPGLVKPSETLSLTCTVSGVSLPDYGVSWIRQPPGKGLEWIGVIWGSETTYYSSSLKSRVTISKDNSKNQVSLKLSSVTAADTAVYYCAKHYYYGGSYAMDYWGQGTLVTVSSGGGGSGGGGSGGGGSGGGGSEIVMTQSPATLSLSPGERATLSCRASQDISKYLNWYQQKPGQAPRLLIYHTSRLHSGIPARFSGSGSGTDYTLTISSLQPEDFAVYFCQQGNTLPYTFGQGTKLEIK

SEQ ID NO: 924 - DNA, 828 bp, synthetic construct
  misc_feature 1..828: note = source = /note="Description of Artificial Sequence: Synthetic polynucleotide"
  source 1..828: mol_type = other DNA
atggcactgcctgtcactgccctcctgctgcctctggccctccttctgcatgccgccaggccccaagtccagctgcaagagtcaggacccggactggtgaagccgtctgagactctctcactgacttgtaccgtcagcggcgtgtccctccccgactacggagtgtcatggatccgccaacctcccgggaaagggcttgaatggattggtgtcatctggggttctgaaaccacctactactcatcttccctgaagtccagggtgaccatcagcaaggataattccaagaaccaggtcagccttaagctgtcatctgtgaccgctgctgacaccgccgtgtattactgcgccaagcactactattacggaggaagctacgctatggactattggggacagggcactctcgtgactgtgagcagcggcggtggagggtctggaggtggaggatccggtggtggtgggtcaggcggaggagggagcgagattgtgatgactcagtcaccagccaccctttctctttcacccggcgagagagcaaccctgagctgtagagccagccaggacatttctaagtacctcaactggtatcagcaaaaaccggggcaggcccctcgcctcctgatctaccatacctcacgccttcactctggtatccccgctcggtttagcggatcaggatctggtaccgactacactctgaccatttccagcctgcagccagaagatttcgcagtgtatttctgccagcagggcaatacccttccttacaccttcggtcagggaaccaagctcgaaatcaagcaccatcaccatcatcaccaccat

SEQ ID NO: 925 - protein, 276 aa, synthetic construct
  REGION 1..276: note = source = /note="Description of Artificial Sequence: Synthetic polypeptide"
MALPVTALLLPLALLLHAARPQVQLQESGPGLVKPSETLSLTCTVSGVSLPDYGVSWIRQPPGKGLEWIGVIWGSETTYYSSSLKSRVTISKDNSKNQVSLKLSSVTAADTAVYYCAKHYYYGGSYAMDYWGQGTLVTVSSGGGGSGGGGSGGGGSGGGGSEIVMTQSPATLSLSPGERATLSCRASQDISKYLNWYQQKPGQAPRLLIYHTSRLHSGIPARFSGSGSGTDYTLTISSLQPEDFAVYFCQQGNTLPYTFGQGTKLEIKHHHHHHHH

SEQ ID NO: 926 - DNA, 1473 bp, synthetic construct
  misc_feature 1..1473: note = source = /note="Description of Artificial Sequence: Synthetic polynucleotide"
  source 1..1473: mol_type = other DNA
atggctctgcccgtgaccgcactcctcctgccactggctctgctgcttcacgccgctcgcccacaagtccagcttcaagaatcagggcctggtctggtgaagccatctgagactctgtccctcacttgcaccgtgagcggagtgtccctcccagactacggagtgagctggattagacagcctcccggaaagggactggagtggatcggagtgatttggggtagcgaaaccacttactattcatcttccctgaagtcacgggtcaccatttcaaaggataactcaaagaatcaagtgagcctcaagctctcatcagtcaccgccgctgacaccgccgtgtattactgtgccaagcattactactatggagggtcctacgccatggactactggggccagggaactctggtcactgtgtcatctggtggaggaggtagcggaggaggcgggagcggtggaggtggctccggaggtggcggaagcgaaatcgtgatgacccagagccctgcaaccctgtccctttctcccggggaacgggctaccctttcttgtcgggcatcacaagatatctcaaaatacctcaattggtatcaacagaagccgggacaggcccctaggcttcttatctaccacacctctcgcctgcatagcgggattcccgcacgctttagcgggtctggaagcgggaccgactacactctgaccatctcatctctccagcccgaggacttcgccgtctacttctgccagcagggtaacaccctgccgtacaccttcggccagggcaccaagcttgagatcaaaaccactactcccgctccaaggccacccacccctgccccgaccatcgcctctcagccgctttccctgcgtccggaggcatgtagacccgcagctggtggggccgtgcatacccggggtcttgacttcgcctgcgatatctacatttgggcccctctggctggtacttgcggggtcctgctgctttcactcgtgatcactctttactgtaagcgcggtcggaagaagctgctgtacatctttaagcaacccttcatgaggcctgtgcagactactcaagaggaggacggctgttcatgccggttcccagaggaggaggaaggcggctgcgaactgcgcgtgaaattcagccgcagcgcagatgctccagcctacaagcaggggcagaaccagctctacaacgaactcaatcttggtcggagagaggagtacgacgtgctggacaagcggagaggacgggacccagaaatgggcgggaagccgcgcagaaagaatccccaagagggcctgtacaacgagctccaaaaggataagatggcagaagcctatagcgagattggtatgaaaggggaacgcagaagaggcaaaggccacgacggactgtaccagggactcagcaccgccaccaaggacacctatgacgctcttcacatgcaggccctgccgcctcgg

SEQ ID NO: 927 - protein, 491 aa, synthetic construct
  REGION 1..491: note = source = /note="Description of Artificial Sequence: Synthetic polypeptide"
MALPVTALLLPLALLLHAARPQVQLQESGPGLVKPSETLSLTCTVSGVSLPDYGVSWIRQPPGKGLEWIGVIWGSETTYYSSSLKSRVTISKDNSKNQVSLKLSSVTAADTAVYYCAKHYYYGGSYAMDYWGQGTLVTVSSGGGGSGGGGSGGGGSGGGGSEIVMTQSPATLSLSPGERATLSCRASQDISKYLNWYQQKPGQAPRLLIYHTSRLHSGIPARFSGSGSGTDYTLTISSLQPEDFAVYFCQQGNTLPYTFGQGTKLEIKTTTPAPRPPTPAPTIASQPLSLRPEACRPAAGGAVHTRGLDFACDIYIWAPLAGTCGVLLLSLVITLYCKRGRKKLLYIFKQPFMRPVQTTQEEDGCSCRFPEEEEGGCELRVKFSRSADAPAYKQGQNQLYNELNLGRREEYDVLDKRRGRDPEMGGKPRRKNPQEGLYNELQKDKMAEAYSEIGMKGERRRGKGHDGLYQGLSTATKDTYDALHMQALPPR

SEQ ID NO: 928 - protein, 247 aa, synthetic construct
  REGION 1..247: note = source = /note="Description of Artificial Sequence: Synthetic polypeptide"
QVQLQESGPGLVKPSETLSLTCTVSGVSLPDYGVSWIRQPPGKGLEWIGVIWGSETTYYQSSLKSRVTISKDNSKNQVSLKLSSVTAADTAVYYCAKHYYYGGSYAMDYWGQGTLVTVSSGGGGSGGGGSGGGGSGGGGSEIVMTQSPATLSLSPGERATLSCRASQDISKYLNWYQQKPGQAPRLLIYHTSRLHSGIPARFSGSGSGTDYTLTISSLQPEDFAVYFCQQGNTLPYTFGQGTKLEIK

SEQ ID NO: 929 - DNA, 828 bp, synthetic construct
  misc_feature 1..828: note = source = /note="Description of Artificial Sequence: Synthetic polynucleotide"
  source 1..828: mol_type = other DNA
atggcactgcctgtcactgccctcctgctgcctctggccctccttctgcatgccgccaggccccaagtccagctgcaagagtcaggacccggactggtgaagccgtctgagactctctcactgacttgtaccgtcagcggcgtgtccctccccgactacggagtgtcatggatccgccaacctcccgggaaagggcttgaatggattggtgtcatctggggttctgaaaccacctactaccagtcttccctgaagtccagggtgaccatcagcaaggataattccaagaaccaggtcagccttaagctgtcatctgtgaccgctgctgacaccgccgtgtattactgcgccaagcactactattacggaggaagctacgctatggactattggggacagggcactctcgtgactgtgagcagcggcggtggagggtctggaggtggaggatccggtggtggtgggtcaggcggaggagggagcgagattgtgatgactcagtcaccagccaccctttctctttcacccggcgagagagcaaccctgagctgtagagccagccaggacatttctaagtacctcaactggtatcagcaaaaaccggggcaggcccctcgcctcctgatctaccatacctcacgccttcactctggtatccccgctcggtttagcggatcaggatctggtaccgactacactctgaccatttccagcctgcagccagaagatttcgcagtgtatttctgccagcagggcaatacccttccttacaccttcggtcagggaaccaagctcgaaatcaagcaccatcaccatcatcatcaccac

SEQ ID NO: 930 - protein, 276 aa, synthetic construct
  REGION 1..276: note = source = /note="Description of Artificial Sequence: Synthetic polypeptide"
MALPVTALLLPLALLLHAARPQVQLQESGPGLVKPSETLSLTCTVSGVSLPDYGVSWIRQPPGKGLEWIGVIWGSETTYYQSSLKSRVTISKDNSKNQVSLKLSSVTAADTAVYYCAKHYYYGGSYAMDYWGQGTLVTVSSGGGGSGGGGSGGGGSGGGGSEIVMTQSPATLSLSPGERATLSCRASQDISKYLNWYQQKPGQAPRLLIYHTSRLHSGIPARFSGSGSGTDYTLTISSLQPEDFAVYFCQQGNTLPYTFGQGTKLEIKHHHHHHHH

SEQ ID NO: 931 - DNA, 1473 bp, synthetic construct
  misc_feature 1..1473: note = source = /note="Description of Artificial Sequence: Synthetic polynucleotide"
  source 1..1473: mol_type = other DNA
atggctctgcccgtgaccgcactcctcctgccactggctctgctgcttcacgccgctcgcccacaagtccagcttcaagaatcagggcctggtctggtgaagccatctgagactctgtccctcacttgcaccgtgagcggagtgtccctcccagactacggagtgagctggattagacagcctcccggaaagggactggagtggatcggagtgatttggggtagcgaaaccacttactatcaatcttccctgaagtcacgggtcaccatttcaaaggataactcaaagaatcaagtgagcctcaagctctcatcagtcaccgccgctgacaccgccgtgtattactgtgccaagcattactactatggagggtcctacgccatggactactggggccagggaactctggtcactgtgtcatctggtggaggaggtagcggaggaggcgggagcggtggaggtggctccggaggcggtgggtcagaaatcgtgatgacccagagccctgcaaccctgtccctttctcccggggaacgggctaccctttcttgtcgggcatcacaagatatctcaaaatacctcaattggtatcaacagaagccgggacaggcccctaggcttcttatctaccacacctctcgcctgcatagcgggattcccgcacgctttagcgggtctggaagcgggaccgactacactctgaccatctcatctctccagcccgaggacttcgccgtctacttctgccagcagggtaacaccctgccgtacaccttcggccagggcaccaagcttgagatcaaaaccactactcccgctccaaggccacccacccctgccccgaccatcgcctctcagccgctttccctgcgtccggaggcatgtagacccgcagctggtggggccgtgcatacccggggtcttgacttcgcctgcgatatctacatttgggcccctctggctggtacttgcggggtcctgctgctttcactcgtgatcactctttactgtaagcgcggtcggaagaagctgctgtacatctttaagcaacccttcatgaggcctgtgcagactactcaagaggaggacggctgttcatgccggttcccagaggaggaggaaggcggctgcgaactgcgcgtgaaattcagccgcagcgcagatgctccagcctacaagcaggggcagaaccagctctacaacgaactcaatcttggtcggagagaggagtacgacgtgctggacaagcggagaggacgggacccagaaatgggcgggaagccgcgcagaaagaatccccaagagggcctgtacaacgagctccaaaaggataagatggcagaagcctatagcgagattggtatgaaaggggaacgcagaagaggcaaaggccacgacggactgtaccagggactcagcaccgccaccaaggacacctatgacgctcttcacatgcaggccctgccgcctcgg

SEQ ID NO: 932 - protein, 491 aa, synthetic construct
  REGION 1..491: note = source = /note="Description of Artificial Sequence: Synthetic polypeptide"
MALPVTALLLPLALLLHAARPQVQLQESGPGLVKPSETLSLTCTVSGVSLPDYGVSWIRQPPGKGLEWIGVIWGSETTYYQSSLKSRVTISKDNSKNQVSLKLSSVTAADTAVYYCAKHYYYGGSYAMDYWGQGTLVTVSSGGGGSGGGGSGGGGSGGGGSEIVMTQSPATLSLSPGERATLSCRASQDISKYLNWYQQKPGQAPRLLIYHTSRLHSGIPARFSGSGSGTDYTLTISSLQPEDFAVYFCQQGNTLPYTFGQGTKLEIKTTTPAPRPPTPAPTIASQPLSLRPEACRPAAGGAVHTRGLDFACDIYIWAPLAGTCGVLLLSLVITLYCKRGRKKLLYIFKQPFMRPVQTTQEEDGCSCRFPEEEEGGCELRVKFSRSADAPAYKQGQNQLYNELNLGRREEYDVLDKRRGRDPEMGGKPRRKNPQEGLYNELQKDKMAEAYSEIGMKGERRRGKGHDGLYQGLSTATKDTYDALHMQALPPR

SEQ ID NO: 933 - protein, 247 aa, synthetic construct
  REGION 1..247: note = source = /note="Description of Artificial Sequence: Synthetic polypeptide"
EIVMTQSPATLSLSPGERATLSCRASQDISKYLNWYQQKPGQAPRLLIYHTSRLHSGIPARFSGSGSGTDYTLTISSLQPEDFAVYFCQQGNTLPYTFGQGTKLEIKGGGGSGGGGSGGGGSGGGGSQVQLQESGPGLVKPSETLSLTCTVSGVSLPDYGVSWIRQPPGKGLEWIGVIWGSETTYYNSSLKSRVTISKDNSKNQVSLKLSSVTAADTAVYYCAKHYYYGGSYAMDYWGQGTLVTVSS

SEQ ID NO: 934 - DNA, 828 bp, synthetic construct
  misc_feature 1..828: note = source = /note="Description of Artificial Sequence: Synthetic polynucleotide"
  source 1..828: mol_type = other DNA
atggccctcccagtgaccgctctgctgctgcctctcgcacttcttctccatgccgctcggcctgagatcgtcatgacccaaagccccgctaccctgtccctgtcacccggcgagagggcaaccctttcatgcagggccagccaggacatttctaagtacctcaactggtatcagcagaagccagggcaggctcctcgcctgctgatctaccacaccagccgcctccacagcggtatccccgccagattttccgggagcgggtctggaaccgactacaccctcaccatctcttctctgcagcccgaggatttcgccgtctatttctgccagcaggggaatactctgccgtacaccttcggtcaaggtaccaagctggaaatcaagggaggcggaggatcaggcggtggcggaagcggaggaggtggctccggaggaggaggttcccaagtgcagcttcaagaatcaggacccggacttgtgaagccatcagaaaccctctccctgacttgtaccgtgtccggtgtgagcctccccgactacggagtctcttggattcgccagcctccggggaagggtcttgaatggattggggtgatttggggatcagagactacttactacaattcatcacttaagtcacgggtcaccatcagcaaagataatagcaagaaccaagtgtcacttaagctgtcatctgtgaccgccgctgacaccgccgtgtactattgtgccaaacattactattacggagggtcttatgctatggactactggggacaggggaccctggtgactgtctctagccatcaccatcaccaccatcatcac

SEQ ID NO: 935 - protein, 276 aa, synthetic construct
  REGION 1..276: note = source = /note="Description of Artificial Sequence: Synthetic polypeptide"
MALPVTALLLPLALLLHAARPEIVMTQSPATLSLSPGERATLSCRASQDISKYLNWYQQKPGQAPRLLIYHTSRLHSGIPARFSGSGSGTDYTLTISSLQPEDFAVYFCQQGNTLPYTFGQGTKLEIKGGGGSGGGGSGGGGSGGGGSQVQLQESGPGLVKPSETLSLTCTVSGVSLPDYGVSWIRQPPGKGLEWIGVIWGSETTYYNSSLKSRVTISKDNSKNQVSLKLSSVTAADTAVYYCAKHYYYGGSYAMDYWGQGTLVTVSSHHHHHHHH

SEQ ID NO: 936 - DNA, 1473 bp, synthetic construct
  misc_feature 1..1473: note = source = /note="Description of Artificial Sequence: Synthetic polynucleotide"
  source 1..1473: mol_type = other DNA
atggccctccctgtcaccgccctgctgcttccgctggctcttctgctccacgccgctcggcccgaaattgtgatgacccagtcacccgccactcttagcctttcacccggtgagcgcgcaaccctgtcttgcagagcctcccaagacatctcaaaataccttaattggtatcaacagaagcccggacaggctcctcgccttctgatctaccacaccagccggctccattctggaatccctgccaggttcagcggtagcggatctgggaccgactacaccctcactatcagctcactgcagccagaggacttcgctgtctatttctgtcagcaagggaacaccctgccctacacctttggacagggcaccaagctcgagattaaaggtggaggtggcagcggaggaggtgggtccggcggtggaggaagcggaggcggtgggagccaggtccaactccaagaaagcggaccgggtcttgtgaagccatcagaaactctttcactgacttgtactgtgagcggagtgtctctccccgattacggggtgtcttggatcagacagccaccggggaagggtctggaatggattggagtgatttggggctctgagactacttactacaactcatccctcaagtcacgcgtcaccatctcaaaggacaactctaagaatcaggtgtcactgaaactgtcatctgtgaccgcagccgacaccgccgtgtactattgcgctaagcattactattatggcgggagctacgcaatggattactggggacagggtactctggtcaccgtgtccagcaccactaccccagcaccgaggccacccaccccggctcctaccatcgcctcccagcctctgtccctgcgtccggaggcatgtagacccgcagctggtggggccgtgcatacccggggtcttgacttcgcctgcgatatctacatttgggcccctctggctggtacttgcggggtcctgctgctttcactcgtgatcactctttactgtaagcgcggtcggaagaagctgctgtacatctttaagcaacccttcatgaggcctgtgcagactactcaagaggaggacggctgttcatgccggttcccagaggaggaggaaggcggctgcgaactgcgcgtgaaattcagccgcagcgcagatgctccagcctacaagcaggggcagaaccagctctacaacgaactcaatcttggtcggagagaggagtacgacgtgctggacaagcggagaggacgggacccagaaatgggcgggaagccgcgcagaaagaatccccaagagggcctgtacaacgagctccaaaaggataagatggcagaagcctatagcgagattggtatgaaaggggaacgcagaagaggcaaaggccacgacggactgtaccagggactcagcaccgccaccaaggacacctatgacgctcttcacatgcaggccctgccgcctcgg

SEQ ID NO: 937 - protein, 491 aa, synthetic construct
  REGION 1..491: note = source = /note="Description of Artificial Sequence: Synthetic polypeptide"
MALPVTALLLPLALLLHAARPEIVMTQSPATLSLSPGERATLSCRASQDISKYLNWYQQKPGQAPRLLIYHTSRLHSGIPARFSGSGSGTDYTLTISSLQPEDFAVYFCQQGNTLPYTFGQGTKLEIKGGGGSGGGGSGGGGSGGGGSQVQLQESGPGLVKPSETLSLTCTVSGVSLPDYGVSWIRQPPGKGLEWIGVIWGSETTYYNSSLKSRVTISKDNSKNQVSLKLSSVTAADTAVYYCAKHYYYGGSYAMDYWGQGTLVTVSSTTTPAPRPPTPAPTIASQPLSLRPEACRPAAGGAVHTRGLDFACDIYIWAPLAGTCGVLLLSLVITLYCKRGRKKLLYIFKQPFMRPVQTTQEEDGCSCRFPEEEEGGCELRVKFSRSADAPAYKQGQNQLYNELNLGRREEYDVLDKRRGRDPEMGGKPRRKNPQEGLYNELQKDKMAEAYSEIGMKGERRRGKGHDGLYQGLSTATKDTYDALHMQALPPR

SEQ ID NO: 938 - protein, 247 aa, synthetic construct
  REGION 1..247: note = source = /note="Description of Artificial Sequence: Synthetic polypeptide"
QVQLQESGPGLVKPSETLSLTCTVSGVSLPDYGVSWIRQPPGKGLEWIGVIWGSETTYYNSSLKSRVTISKDNSKNQVSLKLSSVTAADTAVYYCAKHYYYGGSYAMDYWGQGTLVTVSSGGGGSGGGGSGGGGSGGGGSEIVMTQSPATLSLSPGERATLSCRASQDISKYLNWYQQKPGQAPRLLIYHTSRLHSGIPARFSGSGSGTDYTLTISSLQPEDFAVYFCQQGNTLPYTFGQGTKLEIK

SEQ ID NO: 939 - DNA, 828 bp, synthetic construct
  misc_feature 1..828: note = source = /note="Description of Artificial Sequence: Synthetic polynucleotide"
  source 1..828: mol_type = other DNA
atggcactgcctgtcactgccctcctgctgcctctggccctccttctgcatgccgccaggccccaagtccagctgcaagagtcaggacccggactggtgaagccgtctgagactctctcactgacttgtaccgtcagcggcgtgtccctccccgactacggagtgtcatggatccgccaacctcccgggaaagggcttgaatggattggtgtcatctggggttctgaaaccacctactacaactcttccctgaagtccagggtgaccatcagcaaggataattccaagaaccaggtcagccttaagctgtcatctgtgaccgctgctgacaccgccgtgtattactgcgccaagcactactattacggaggaagctacgctatggactattggggacagggcactctcgtgactgtgagcagcggcggtggagggtctggaggtggaggatccggtggtggtgggtcaggcggaggagggagcgagattgtgatgactcagtcaccagccaccctttctctttcacccggcgagagagcaaccctgagctgtagagccagccaggacatttctaagtacctcaactggtatcagcaaaaaccggggcaggcccctcgcctcctgatctaccatacctcacgccttcactctggtatccccgctcggtttagcggatcaggatctggtaccgactacactctgaccatttccagcctgcagccagaagatttcgcagtgtatttctgccagcagggcaatacccttccttacaccttcggtcagggaaccaagctcgaaatcaagcaccatcaccatcatcaccaccat

SEQ ID NO: 940 - protein, 276 aa, synthetic construct
  REGION 1..276: note = source = /note="Description of Artificial Sequence: Synthetic polypeptide"
MALPVTALLLPLALLLHAARPQVQLQESGPGLVKPSETLSLTCTVSGVSLPDYGVSWIRQPPGKGLEWIGVIWGSETTYYNSSLKSRVTISKDNSKNQVSLKLSSVTAADTAVYYCAKHYYYGGSYAMDYWGQGTLVTVSSGGGGSGGGGSGGGGSGGGGSEIVMTQSPATLSLSPGERATLSCRASQDISKYLNWYQQKPGQAPRLLIYHTSRLHSGIPARFSGSGSGTDYTLTISSLQPEDFAVYFCQQGNTLPYTFGQGTKLEIKHHHHHHHH

SEQ ID NO: 941 - DNA, 1473 bp, synthetic construct; identical to SEQ ID NO: 936
  misc_feature 1..1473: note = source = /note="Description of Artificial Sequence: Synthetic polynucleotide"
  source 1..1473: mol_type = other DNA

SEQ ID NO: 942 - protein, 491 aa, synthetic construct; identical to SEQ ID NO: 937
  REGION 1..491: note = source = /note="Description of Artificial Sequence: Synthetic polypeptide"

SEQ ID NO: 943 - protein, 242 aa, synthetic construct
  REGION 1..242: note = source = /note="Description of Artificial Sequence: Synthetic polypeptide"
EIVMTQSPATLSLSPGERATLSCRASQDISKYLNWYQQKPGQAPRLLIYHTSRLHSGIPARFSGSGSGTDYTLTISSLQPEDFAVYFCQQGNTLPYTFGQGTKLEIKGGGGSGGGGSGGGGSQVQLQESGPGLVKPSETLSLTCTVSGVSLPDYGVSWIRQPPGKGLEWIGVIWGSETTYYNSSLKSRVTISKDNSKNQVSLKLSSVTAADTAVYYCAKHYYYGGSYAMDYWGQGTLVTVSS

SEQ ID NO: 944 - DNA, 813 bp, synthetic construct
  misc_feature 1..813: note = source = /note="Description of Artificial Sequence: Synthetic polynucleotide"
  source 1..813: mol_type = other DNA
atggccctccctgtcaccgccctgctgcttccgctggctcttctgctccacgccgctcggcccgaaattgtgatgacccagtcacccgccactcttagcctttcacccggtgagcgcgcaaccctgtcttgcagagcctcccaagacatctcaaaataccttaattggtatcaacagaagcccggacaggctcctcgccttctgatctaccacaccagccggctccattctggaatccctgccaggttcagcggtagcggatctgggaccgactacaccctcactatcagctcactgcagccagaggacttcgctgtctatttctgtcagcaagggaacaccctgccctacacctttggacagggcaccaagctcgagattaaaggtggaggtggcagcggaggaggtgggtccggcggtggaggaagccaggtccaactccaagaaagcggaccgggtcttgtgaagccatcagaaactctttcactgacttgtactgtgagcggagtgtctctccccgattacggggtgtcttggatcagacagccaccggggaagggtctggaatggattggagtgatttggggctctgagactacttactacaattcatccctcaagtcacgcgtcaccatctcaaaggacaactctaagaatcaggtgtcactgaaactgtcatctgtgaccgcagccgacaccgccgtgtactattgcgctaagcattactattatggcgggagctacgcaatggattactggggacagggtactctggtcaccgtgtccagccaccaccatcatcaccatcaccat

SEQ ID NO: 945 - protein, 271 aa, synthetic construct
  REGION 1..271: note = source = /note="Description of Artificial Sequence: Synthetic polypeptide"
MALPVTALLLPLALLLHAARPEIVMTQSPATLSLSPGERATLSCRASQDISKYLNWYQQKPGQAPRLLIYHTSRLHSGIPARFSGSGSGTDYTLTISSLQPEDFAVYFCQQGNTLPYTFGQGTKLEIKGGGGSGGGGSGGGGSQVQLQESGPGLVKPSETLSLTCTVSGVSLPDYGVSWIRQPPGKGLEWIGVIWGSETTYYNSSLKSRVTISKDNSKNQVSLKLSSVTAADTAVYYCAKHYYYGGSYAMDYWGQGTLVTVSSHHHHHHHH

SEQ ID NO: 946 - DNA, 1473 bp, synthetic construct
  misc_feature 1..1473: note = source = /note="Description of Artificial Sequence: Synthetic polynucleotide"
  source 1..1473: mol_type = other DNA
atggctctgcccgtgaccgcactcctcctgccactggctctgctgcttcacgccgctcgcccacaagtccagcttcaagaatcagggcctggtctggtgaagccatctgagactctgtccctcacttgcaccgtgagcggagtgtccctcccagactacggagtgagctggattagacagcctcccggaaagggactggagtggatcggagtgatttggggtagcgaaaccacttactataactcttccctgaagtcacgggtcaccatttcaaaggataactcaaagaatcaagtgagcctcaagctctcatcagtcaccgccgctgacaccgccgtgtattactgtgccaagcattactactatggagggtcctacgccatggactactggggccagggaactctggtcactgtgtcatctggtggaggaggtagcggaggaggcgggagcggtggaggtggctccggaggtggcggaagcgaaatcgtgatgacccagagccctgcaaccctgtccctttctcccggggaacgggctaccctttcttgtcgggcatcacaagatatctcaaaatacctcaattggtatcaacagaagccgggacaggcccctaggcttcttatctaccacacctctcgcctgcatagcgggattcccgcacgctttagcgggtctggaagcgggaccgactacactctgaccatctcatctctccagcccgaggacttcgccgtctacttctgccagcagggtaacaccctgccgtacaccttcggccagggcaccaagcttgagatcaaaaccactactcccgctccaaggccacccacccctgccccgaccatcgcctctcagccgctttccctgcgtccggaggcatgtagacccgcagctggtggggccgtgcatacccggggtcttgacttcgcctgcgatatctacatttgggcccctctggctggtacttgcggggtcctgctgctttcactcgtgatcactctttactgtaagcgcggtcggaagaagctgctgtacatctttaagcaacccttcatgaggcctgtgcagactactcaagaggaggacggctgttcatgccggttcccagaggaggaggaaggcggctgcgaactgcgcgtgaaattcagccgcagcgcagatgctccagcctacaagcaggggcagaaccagctctacaacgaactcaatcttggtcggagagaggagtacgacgtgctggacaagcggagaggacgggacccagaaatgggcgggaagccgcgcagaaagaatccccaagagggcctgtacaacgagctccaaaaggataagatggcagaagcctatagcgagattggtatgaaaggggaacgcagaagaggcaaaggccacgacggactgtaccagggactcagcaccgccaccaaggacacctatgacgctcttcacatgcaggccctgccgcctcgg

SEQ ID NO: 947 - protein, 491 aa, synthetic construct
  REGION 1..491: note = source = /note="Description of Artificial Sequence: Synthetic polypeptide"
MALPVTALLLPLALLLHAARPQVQLQESGPGLVKPSETLSLTCTVSGVSLPDYGVSWIRQPPGKGLEWIGVIWGSETTYYNSSLKSRVTISKDNSKNQVSLKLSSVTAADTAVYYCAKHYYYGGSYAMDYWGQGTLVTVSSGGGGSGGGGSGGGGSGGGGSEIVMTQSPATLSLSPGERATLSCRASQDISKYLNWYQQKPGQAPRLLIYHTSRLHSGIPARFSGSGSGTDYTLTISSLQPEDFAVYFCQQGNTLPYTFGQGTKLEIKTTTPAPRPPTPAPTIASQPLSLRPEACRPAAGGAVHTRGLDFACDIYIWAPLAGTCGVLLLSLVITLYCKRGRKKLLYIFKQPFMRPVQTTQEEDGCSCRFPEEEEGGCELRVKFSRSADAPAYKQGQNQLYNELNLGRREEYDVLDKRRGRDPEMGGKPRRKNPQEGLYNELQKDKMAEAYSEIGMKGERRRGKGHDGLYQGLSTATKDTYDALHMQALPPR

SEQ ID NO: 948 - protein, 242 aa, synthetic construct
  REGION 1..242: note = source = /note="Description of Artificial Sequence: Synthetic polypeptide"
QVQLQESGPGLVKPSETLSLTCTVSGVSLPDYGVSWIRQPPGKGLEWIGVIWGSETTYYNSSLKSRVTISKDNSKNQVSLKLSSVTAADTAVYYCAKHYYYGGSYAMDYWGQGTLVTVSSGGGGSGGGGSGGGGSEIVMTQSPATLSLSPGERATLSCRASQDISKYLNWYQQKPGQAPRLLIYHTSRLHSGIPARFSGSGSGTDYTLTISSLQPEDFAVYFCQQGNTLPYTFGQGTKLEIK

SEQ ID NO: 949 - DNA, 813 bp, synthetic construct
  misc_feature 1..813: note = source = /note="Description of Artificial Sequence: Synthetic polynucleotide"
  source 1..813: mol_type = other DNA
atggctctgcccgtgaccgcactcctcctgccactggctctgctgcttcacgccgctcgcccacaagtccagcttcaagaatcagggcctggtctggtgaagccatctgagactctgtccctcacttgcaccgtgagcggagtgtccctcccagactacggagtgagctggattagacagcctcccggaaagggactggagtggatcggagtgatttggggtagcgaaaccacttactataactcttccctgaagtcacgggtcaccatttcaaaggataactcaaagaatcaagtgagcctcaagctctcatcagtcaccgccgctgacaccgccgtgtattactgtgccaagcattactactatggagggtcctacgccatggactactggggccagggaactctggtcactgtgtcatctggtggaggaggtagcggaggaggcgggagcggtggaggtggctccgaaatcgtgatgacccagagccctgcaaccctgtccctttctcccggggaacgggctaccctttcttgtcgggcatcacaagatatctcaaaatacctcaattggtatcaacagaagccgggacaggcccctaggcttcttatctaccacacctctcgcctgcatagcgggattcccgcacgctttagcgggtctggaagcgggaccgactacactctgaccatctcatctctccagcccgaggacttcgccgtctacttctgccagcagggtaacaccctgccgtacaccttcggccagggcaccaagcttgagatcaaacatcaccaccatcatcaccatcac

SEQ ID NO: 950 - protein, 271 aa, synthetic construct
  REGION 1..271: note = source = /note="Description of Artificial Sequence: Synthetic polypeptide"
MALPVTALLLPLALLLHAARPQVQLQESGPGLVKPSETLSLTCTVSGVSLPDYGVSWIRQPPGKGLEWIGVIWGSETTYYNSSLKSRVTISKDNSKNQVSLKLSSVTAADTAVYYCAKHYYYGGSYAMDYWGQGTLVTVSSGGGGSGGGGSGGGGSEIVMTQSPATLSLSPGERATLSCRASQDISKYLNWYQQKPGQAPRLLIYHTSRLHSGIPARFSGSGSGTDYTLTISSLQPEDFAVYFCQQGNTLPYTFGQGTKLEIKHHHHHHHH

SEQ ID NO: 951 - DNA, 1458 bp, synthetic construct
  misc_feature 1..1458: note = source = /note="Description of Artificial Sequence: Synthetic polynucleotide"
  source 1..1458: mol_type = other DNA
atggccctccctgtcaccgccctgctgcttccgctggctcttctgctccacgccgctcggcccgaaattgtgatgacccagtcacccgccactcttagcctttcacccggtgagcgcgcaaccctgtcttgcagagcctcccaagacatctcaaaataccttaattggtatcaacagaagcccggacaggctcctcgccttctgatctaccacaccagccggctccattctggaatccctgccaggttcagcggtagcggatctgggaccgactacaccctcactatcagctcactgcagccagaggacttcgctgtctatttctgtcagcaagggaacaccctgccctacacctttggacagggcaccaagctcgagattaaaggtggaggtggcagcggaggaggtgggtccggcggtggaggaagccaggtccaactccaagaaagcggaccgggtcttgtgaagccatcagaaactctttcactgacttgtactgtgagcggagtgtctctccccgattacggggtgtcttggatcagacagccaccggggaagggtctggaatggattggagtgatttggggctctgagactacttactacaactcatccctcaagtcacgcgtcaccatctcaaaggacaactctaagaatcaggtgtcactgaaactgtcatctgtgaccgcagccgacaccgccgtgtactattgcgctaagcattactattatggcgggagctacgcaatggattactggggacagggtactctggtcaccgtgtccagcaccactaccccagcaccgaggccacccaccccggctcctaccatcgcctcccagcctctgtccctgcgtccggaggcatgtagacccgcagctggtggggccgtgcatacccggggtcttgacttcgcctgcgatatctacatttgggcccctctggctggtacttgcggggtcctgctgctttcactcgtgatcactctttactgtaagcgcggtcggaagaagctgctgtacatctttaagcaacccttcatgaggcctgtgcagactactcaagaggaggacggctgttcatgccggttcccagaggaggaggaaggcggctgcgaactgcgcgtgaaattcagccgcagcgcagatgctccagcctacaagcaggggcagaaccagctctacaacgaactcaatcttggtcggagagaggagtacgacgtgctggacaagcggagaggacgggacccagaaatgggcgggaagccgcgcagaaagaatccccaagagggcctgtacaacgagctccaaaaggataagatggcagaagcctatagcgagattggtatgaaaggggaacgcagaagaggcaaaggccacgacggactgtaccagggactcagcaccgccaccaaggacacctatgacgctcttcacatgcaggccctgccgcctcgg

SEQ ID NO: 952 - protein, 486 aa, synthetic construct
  REGION 1..486: note = source = /note="Description of Artificial Sequence: Synthetic polypeptide"
MALPVTALLLPLALLLHAARPEIVMTQSPATLSLSPGERATLSCRASQDISKYLNWYQQKPGQAPRLLIYHTSRLHSGIPARFSGSGSGTDYTLTISSLQPEDFAVYFCQQGNTLPYTFGQGTKLEIKGGGGSGGGGSGGGGSQVQLQESGPGLVKPSETLSLTCTVSGVSLPDYGVSWIRQPPGKGLEWIGVIWGSETTYYNSSLKSRVTISKDNSKNQVSLKLSSVTAADTAVYYCAKHYYYGGSYAMDYWGQGTLVTVSSTTTPAPRPPTPAPTIASQPLSLRPEACRPAAGGAVHTRGLDFACDIYIWAPLAGTCGVLLLSLVITLYCKRGRKKLLYIFKQPFMRPVQTTQEEDGCSCRFPEEEEGGCELRVKFSRSADAPAYKQGQNQLYNELNLGRREEYDVLDKRRGRDPEMGGKPRRKNPQEGLYNELQKDKMAEAYSEIGMKGERRRGKGHDGLYQGLSTATKDTYDALHMQALPPR

SEQ ID NO: 953 - DNA, 813 bp, synthetic construct
  misc_feature 1..813: note = source = /note="Description of Artificial Sequence: Synthetic polynucleotide"
  source 1..813: mol_type = other DNA
atggccctgcccgtcaccgctctgctgctgccccttgctctgcttcttcatgcagcaaggccggacatccagatgacccaaaccacctcatccctctctgcctctcttggagacagggtgaccatttcttgtcgcgccagccaggacatcagcaagtatctgaactggtatcagcagaagccggacggaaccgtgaagctcctgatctaccatacctctcgcctgcatagcggcgtgccctcacgcttctctggaagcggatcaggaaccgattattctctcactatttcaaatcttgagcaggaagatattgccacctatttctgccagcagggtaataccctgccctacaccttcggaggagggaccaagctcgaaatcaccggtggaggaggcagcggcggtggagggtctggtggaggtggttctgaggtgaagctgcaagaatcaggccctggacttgtggccccttcacagtccctgagcgtgacttgcaccgtgtccggagtctccctgcccgactacggagtgtcatggatcagacaacctccacggaaaggactggaatggctcggtgtcatctggggtagcgaaactacttactacaattcagccctcaaaagcaggctgactattatcaaggacaacagcaagtcccaagtctttcttaagatgaactcactccagactgacgacaccgcaatctactattgtgctaagcactactactacggaggatcctacgctatggattactggggacaaggtacttccgtcactgtctcttcacaccatcatcaccatcaccatcac

SEQ ID NO: 954 - protein, 271 aa, synthetic construct
  REGION 1..271: note = source = /note="Description of Artificial Sequence: Synthetic polypeptide"
MALPVTALLLPLALLLHAARPDIQMTQTTSSLSASLGDRVTISCRASQDISKYLNWYQQKPDGTVKLLIYHTSRLHSGVPSRFSGSGSGTDYSLTISNLEQEDIATYFCQQGNTLPYTFGGGTKLEITGGGGSGGGGSGGGGSEVKLQESGPGLVAPSQSLSVTCTVSGVSLPDYGVSWIRQPPRKGLEWLGVIWGSETTYYNSALKSRLTIIKDNSKSQVFLKMNSLQTDDTAIYYCAKHYYYGGSYAMDYWGQGTSVTVSSHHHHHHHH

SEQ ID NO: 955 - DNA, 1458 bp, synthetic construct
  misc_feature 1..1458: note = source = /note="Description of Artificial Sequence: Synthetic polynucleotide"
  source 1..1458: mol_type = other DNA
atggccttaccagtgaccgccttgctcctgccgctggccttgctgctccacgccgccaggccggacatccagatgacacagactacatcctccctgtctgcctctctgggagacagagtcaccatcagttgcagggcaagtcaggacattagtaaatatttaaattggtatcagcagaaaccagatggaactgttaaactcctgatctaccatacatcaagattacactcaggagtcccatcaaggttcagtggcagtgggtctggaacagattattctctcaccattagcaacctggagcaagaagatattgccacttacttttgccaacagggtaatacgcttccgtacacgttcggaggggggaccaagctggagatcacaggtggcggtggctcgggcggtggtgggtcgggtggcggcggatctgaggtgaaactgcaggagtcaggacctggcctggtggcgccctcacagagcctgtccgtcacatgcactgtctcaggggtctcattacccgactatggtgtaagctggattcgccagcctccacgaaagggtctggagtggctgggagtaatatggggtagtgaaaccacatactataattcagctctcaaatccagactgaccatcatcaaggacaactccaagagccaagttttcttaaaaatgaacagtctgcaaactgatgacacagccatttactactgtgccaaacattattactacggtggtagctatgctatggactactggggccaaggaacctcagtcaccgtctcctcaaccacgacgccagcgccgcgaccaccaacaccggcgcccaccatcgcgtcgcagcccctgtccctgcgcccagaggcgtgccggccagcggcggggggcgcagtgcacacgagggggctggacttcgcctgtgatatctacatctgggcgcccttggccgggacttgtggggtccttctcctgtcactggttatcaccctttactgcaaacggggcagaaagaaactcctgtatatattcaaacaaccatttatgagaccagtacaaactactcaagaggaagatggctgtagctgccgatttccagaagaagaagaaggaggatgtgaactgagagtgaagttcagcaggagcgcagacgcccccgcgtacaagcagggccagaaccagctctataacgagctcaatctaggacgaagagaggagtacgatgttttggacaagagacgtggccgggaccctgagatggggggaaagccgagaaggaagaaccctcaggaaggcctgtacaatgaactgcagaaagataagatggcggaggcctacagtgagattgggatgaaaggcgagcgccggaggggcaaggggcacgatggcctttaccagggtctcagtacagccaccaaggacacctacgacgcccttcacatgcaggccctgccccctcgc

SEQ ID NO: 956 - protein, 486 aa, synthetic construct; identical to SEQ ID NO: 891
  REGION 1..486: note = source = /note="Description of Artificial Sequence: Synthetic polypeptide"

SEQ ID NO: 957 - protein, 242 aa, synthetic construct
  REGION 1..242: note = source = /note="Description of Artificial Sequence: Synthetic polypeptide"
DIQMTQTTSSLSASLGDRVTISCRASQDISKYLNWYQQKPDGTVKLLIYHTSRLHSGVPSRFSGSGSGTDYSLTISNLEQEDIATYFCQQGNTLPYTFGGGTKLEITGGGGSGGGGSGGGGSEVKLQESGPGLVAPSQSLSVTCTVSGVSLPDYGVSWIRQPPRKGLEWLGVIWGSETTYYNSALKSRLTIIKDNSKSQVFLKMNSLQTDDTAIYYCAKHYYYGGSYAMDYWGQGTSVTVSS

SEQ ID NO: 958 - protein, 5 aa, synthetic construct
  REGION 1..5: note = source = /note="Description of Artificial Sequence: Synthetic peptide"
DYGVS

SEQ ID NO: 959 - protein, 16 aa, synthetic construct
  REGION 1..16: note = source = /note="Description of Artificial Sequence: Synthetic peptide"
VIWGSETTYYNSALKS

SEQ ID NO: 960 - protein, 12 aa, synthetic construct
  REGION 1..12: note = source = /note="Description of Artificial Sequence: Synthetic peptide"
HYYYGGSYAMDY

SEQ ID NO: 961 - protein, 16 aa, synthetic construct
  REGION 1..16: note = source = /note="Description of Artificial Sequence: Synthetic peptide"
VIWGSETTYYSSSLKS

SEQ ID NO: 962 - protein, 16 aa, synthetic construct
  REGION 1..16: note = source = /note="Description of Artificial Sequence: Synthetic peptide"
VIWGSETTYYQSSLKS

SEQ ID NO: 963 - protein, 16 aa, synthetic construct
  REGION 1..16: note = source = /note="Description of Artificial Sequence: Synthetic peptide"
VIWGSETTYYNSSLKS

SEQ ID NO: 964 - protein, 11 aa, synthetic construct
  REGION 1..11: note = source = /note="Description of Artificial Sequence: Synthetic peptide"
RASQDISKYLN

SEQ ID NO: 965 - protein, 7 aa, synthetic construct
  REGION 1..7: note = source = /note="Description of Artificial Sequence: Synthetic peptide"
HTSRLHS

SEQ ID NO: 966 - protein, 9 aa, synthetic construct
  REGION 1..9: note = source = /note="Description of Artificial Sequence: Synthetic peptide"
QQGNTLPYT

SEQ ID NO: 967 - protein, 239 aa, synthetic construct
  REGION 1..239: note = source = /note="Description of Artificial Sequence: Synthetic polypeptide"
EVQLVESGGGLVQPGGSLRLSCAVSGFALSNHGMSWVRRAPGKGLEWVSGIVYSGSTYYAASVKGRFTISRDNSRNTLYLQMNSLRPEDTAIYYCSAHGGESDVWGQGTTVTVSSASGGGGSGGRASGGGGSDIQLTQSPSSLSASVGDRVTITCRASQSISSYLNWYQQKPGKAPKLLIYAASSLQSGVPSRFSGSGSGTDFTLTISSLQPEDFATYYCQQSYSTPYTFGQGTKVEIK

SEQ ID NO: 968 - DNA, 717 bp, synthetic construct
  misc_feature 1..717: note = source = /note="Description of Artificial Sequence: Synthetic polynucleotide"
  source 1..717: mol_type = other DNA
gaagtgcaattggtggaatcagggggaggacttgtgcagcctggaggatcgctgagactgtcatgtgccgtgtccggctttgccctgtccaaccacgggatgtcctgggtccgccgcgcgcctggaaagggcctcgaatgggtgtcgggtattgtgtacagcggtagcacctactatgccgcatccgtgaaggggagattcaccatcagccgggacaactccaggaacactctgtacctccaaatgaattcgctgaggccagaggacactgccatctactactgctccgcgcatggcggagagtccgacgtctggggacaggggaccaccgtgaccgtgtctagcgcgtccggcggaggcggcagcgggggtcgggcatcagggggcggcggatcggacatccagctcacccagtccccgagctcgctgtccgcctccgtgggagatcgggtcaccatcacgtgccgcgccagccagtcgatttcctcctacctgaactggtaccaacagaagcccggaaaagccccgaagcttctcatctacgccgcctcgagcctgcagtcaggagtgccctcacggttctccggctccggttccggtactgatttcaccctgaccatttcctccctgcaaccggaggacttcgctacttactactgccagcagtcgtactccaccccctacactttcggacaaggcaccaaggtcgaaatcaag

SEQ ID NO: 969 - protein, 115 aa, synthetic construct
  REGION 1..115: note = source = /note="Description of Artificial Sequence: Synthetic polypeptide"
EVQLVESGGGLVQPGGSLRLSCAVSGFALSNHGMSWVRRAPGKGLEWVSGIVYSGSTYYAASVKGRFTISRDNSRNTLYLQMNSLRPEDTAIYYCSAHGGESDVWGQGTTVTVSS

SEQ ID NO: 970 - protein, 107 aa, synthetic construct
  REGION 1..107: note = source = /note="Description of Artificial Sequence: Synthetic polypeptide"
DIQLTQSPSSLSASVGDRVTITCRASQSISSYLNWYQQKPGKAPKLLIYAASSLQSGVPSRFSGSGSGTDFTLTISSLQPEDFATYYCQQSYSTPYTFGQGTKVEIK

SEQ ID NO: 971 - protein, 483 aa, synthetic construct
  REGION 1..483: note = source = /note="Description of Artificial Sequence: Synthetic polypeptide"
MALPVTALLLPLALLLHAARPEVQLVESGGGLVQPGGSLRLSCAVSGFALSNHGMSWVRRAPGKGLEWVSGIVYSGSTYYAASVKGRFTISRDNSRNTLYLQMNSLRPEDTAIYYCSAHGGESDVWGQGTTVTVSSASGGGGSGGRASGGGGSDIQLTQSPSSLSASVGDRVTITCRASQSISSYLNWYQQKPGKAPKLLIYAASSLQSGVPSRFSGSGSGTDFTLTISSLQPEDFATYYCQQSYSTPYTFGQGTKVEIKTTTPAPRPPTPAPTIASQPLSLRPEACRPAAGGAVHTRGLDFACDIYIWAPLAGTCGVLLLSLVITLYCKRGRKKLLYIFKQPFMRPVQTTQEEDGCSCRFPEEEEGGCELRVKFSRSADAPAYKQGQNQLYNELNLGRREEYDVLDKRRGRDPEMGGKPRRKNPQEGLYNELQKDKMAEAYSEIGMKGERRRGKGHDGLYQGLSTATKDTYDALHMQALPPR

SEQ ID NO: 972 - DNA, 1449 bp, synthetic construct
  misc_feature 1..1449: note = source = /note="Description of Artificial Sequence: Synthetic polynucleotide"
  source 1..1449: mol_type = other DNA
atggccctccctgtcaccgccctgctgcttccgctggctcttctgctccacgccgctcggcccgaagtgcaattggtggaatcagggggaggacttgtgcagcctggaggatcgctgagactgtcatgtgccgtgtccggctttgccctgtccaaccacgggatgtcctgggtccgccgcgcgcctggaaagggcctcgaatgggtgtcgggtattgtgtacagcggtagcacctactatgccgcatccgtgaaggggagattcaccatcagccgggacaactccaggaacactctgtacctccaaatgaattcgctgaggccagaggacactgccatctactactgctccgcgcatggcggagagtccgacgtctggggacaggggaccaccgtgaccgtgtctagcgcgtccggcggaggcggcagcgggggtcgggcatcagggggcggcggatcggacatccagctcacccagtccccgagctcgctgtccgcctccgtgggagatcgggtcaccatcacgtgccgcgccagccagtcgatttcctcctacctgaactggtaccaacagaagcccggaaaagccccgaagcttctcatctacgccgcctcgagcctgcagtcaggagtgccctcacggttctccggctccggttccggtactgatttcaccctgaccatttcctccctgcaaccggaggacttcgctacttactactgccagcagtcgtactccaccccctacactttcggacaaggcaccaaggtcgaaatcaagaccactaccccagcaccgaggccacccaccccggctcctaccatcgcctcccagcctctgtccctgcgtccggaggcatgtagacccgcagctggtggggccgtgcatacccggggtcttgacttcgcctgcgatatctacatttgggcccctctggctggtacttgcggggtcctgctgctttcactcgtgatcactctttactgtaagcgcggtcggaagaagctgctgtacatctttaagcaacccttcatgaggcctgtgcagactactcaagaggaggacggctgttcatgccggttcccagaggaggaggaaggcggctgcgaactgcgcgtgaaattcagccgcagcgcagatgctccagcctacaagcaggggcagaaccagctctacaacgaactcaatcttggtcggagagaggagtacgacgtgctggacaagcggagaggacgggacccagaaatgggcgggaagccgcgcagaaagaatccccaagagggcctgtacaacgagctccaaaaggataagatggcagaagcctatagcgagattggtatgaaaggggaacgcagaagaggcaaaggccacgacggactgtaccagggactcagcaccgccaccaaggacacctatgacgctcttcacatgcaggccctgccgcctcgg

SEQ ID NO: 973 - protein, 246 aa, synthetic construct
  REGION 1..246: note = source = /note="Description of Artificial Sequence: Synthetic polypeptide"
QVQLVESGGGLVQPGRSLRLSCAASGFTFSNYAMSWVRQAPGKGLGWVSGISRSGENTYYADSVKGRFTISRDNSKNTLYLQMNSLRDEDTAVYYCARSPAHYYGGMDVWGQGTTVTVSSASGGGGSGGRASGGGGSDIVLTQSPGTLSLSPGERATLSCRASQSISSSFLAWYQQKPGQAPRLLIYGASRRATGIPDRFSGSGSGTDFTLTISRLEPEDSAVYYCQQYHSSPSWTFGQGTKLEIK

SEQ ID NO: 974 - DNA, 738 bp, synthetic construct
  misc_feature 1..738: note = source = /note="Description of Artificial Sequence: Synthetic polynucleotide"
  source 1..738: mol_type = other DNA
caagtgcaactcgtggaatctggtggaggactcgtgcaacccggaagatcgcttagactgtcgtgtgccgccagcgggttcactttctcgaactacgcgatgtcctgggtccgccaggcacccggaaagggactcggttgggtgtccggcatttcccggtccggcgaaaatacctactacgccgactccgtgaagggccgcttcaccatctcaagggacaacagcaaaaacaccctgtacttgcaaatgaactccctgcgggatgaagatacagccgtgtactattgcgcccggtcgcctgcccattactacggcggaatggacgtctggggacagggaaccactgtgactgtcagcagcgcgtcgggtggcggcggctcagggggtcgggcctccggggggggagggtccgacatcgtgctgacccagtccccgggaaccctgagcctgagcccgggagagcgcgcgaccctgtcatgccgggcatcccagagcattagctcctcctttctcgcctggtatcagcagaagcccggacaggccccgaggctgctgatctacggcgctagcagaagggctaccggaatcccagaccggttctccggctccggttccgggaccgatttcacccttactatctcgcgcctggaacctgaggactccgccgtctactactgccagcagtaccactcatccccgtcgtggacgttcggacagggcaccaagctggagattaag

SEQ ID NO: 975 - protein, 120 aa, synthetic construct
  REGION 1..120: note = source = /note="Description of Artificial Sequence: Synthetic polypeptide"
QVQLVESGGGLVQPGRSLRLSCAASGFTFSNYAMSWVRQAPGKGLGWVSGISRSGENTYYADSVKGRFTISRDNSKNTLYLQMNSLRDEDTAVYYCARSPAHYYGGMDVWGQGTTVTVSS

SEQ ID NO: 976 - protein, 109 aa, synthetic construct
  REGION 1..109: note = source = /note="Description of Artificial Sequence: Synthetic polypeptide"
DIVLTQSPGTLSLSPGERATLSCRASQSISSSFLAWYQQKPGQAPRLLIYGASRRATGIPDRFSGSGSGTDFTLTISRLEPEDSAVYYCQQYHSSPSWTFGQGTKLEIK

SEQ ID NO: 977 - protein, 490 aa, synthetic construct
  REGION 1..490: note = source = /note="Description of Artificial Sequence: Synthetic polypeptide"
MALPVTALLLPLALLLHAARPQVQLVESGGGLVQPGRSLRLSCAASGFTFSNYAMSWVRQAPGKGLGWVSGISRSGENTYYADSVKGRFTISRDNSKNTLYLQMNSLRDEDTAVYYCARSPAHYYGGMDVWGQGTTVTVSSASGGGGSGGRASGGGGSDIVLTQSPGTLSLSPGERATLSCRASQSISSSFLAWYQQKPGQAPRLLIYGASRRATGIPDRFSGSGSGTDFTLTISRLEPEDSAVYYCQQYHSSPSWTFGQGTKLEIKTTTPAPRPPTPAPTIASQPLSLRPEACRPAAGGAVHTRGLDFACDIYIWAPLAGTCGVLLLSLVITLYCKRGRKKLLYIFKQPFMRPVQTTQEEDGCSCRFPEEEEGGCELRVKFSRSADAPAYKQGQNQLYNELNLGRREEYDVLDKRRGRDPEMGGKPRRKNPQEGLYNELQKDKMAEAYSEIGMKGERRRGKGHDGLYQGLSTATKDTYDALHMQALPPR

SEQ ID NO: 978 - DNA, 1470 bp, synthetic construct
  misc_feature 1..1470: note = source = /note="Description of Artificial Sequence: Synthetic polynucleotide"
  source 1..1470: mol_type = other DNA
atggccctccctgtcaccgccctgctgcttccgctggctcttctgctccacgccgctcggccccaagtgcaactcgtggaatctggtggaggactcgtgcaacccggaagatcgcttagactgtcgtgtgccgccagcgggttcactttctcgaactacgcgatgtcctgggtccgccaggcacccggaaagggactcggttgggtgtccggcatttcccggtccggcgaaaatacctactacgccgactccgtgaagggccgcttcaccatctcaagggacaacagcaaaaacaccctgtacttgcaaatgaactccctgcgggatgaagatacagccgtgtactattgcgcccggtcgcctgcccattactacggcggaatggacgtctggggacagggaaccactgtgactgtcagcagcgcgtcgggtggcggcggctcagggggtcgggcctccggggggggagggtccgacatcgtgctgacccagtccccgggaaccctgagcctgagcccgggagagcgcgcgaccctgtcatgccgggcatcccagagcattagctcctcctttctcgcctggtatcagcagaagcccggacaggccccgaggctgctgatctacggcgctagcagaagggctaccggaatcccagaccggttctccggctccggttccgggaccgatttcacccttactatctcgcgcctggaacctgaggactccgccgtctactactgccagcagtaccactcatccccgtcgtggacgttcggacagggcaccaagctggagattaagaccactaccccagcaccgaggccacccaccccggctcctaccatcgcctcccagcctctgtccctgcgtccggaggcatgtagacccgcagctggtggggccgtgcatacccggggtcttgacttcgcctgcgatatctacatttgggcccctctggctggtacttgcggggtcctgctgctttcactcgtgatcactctttactgtaagcgcggtcggaagaagctgctgtacatctttaagcaacccttcatgaggcctgtgcagactactcaagaggaggacggctgttcatgccggttcccagaggaggaggaaggcggctgcgaactgcgcgtgaaattcagccgcagcgcagatgctccagcctacaagcaggggcagaaccagctctacaacgaactcaatcttggtcggagagaggagtacgacgtgctggacaagcggagaggacgggacccagaaatgggcgggaagccgcgcagaaagaatccccaagagggcctgtacaacgagctccaaaaggataagatggcagaagcctatagcgagattggtatgaaaggggaacgcagaagaggcaaaggccacgacggactgtaccagggactcagcaccgccaccaaggacacctatgacgctcttcacatgcaggccctgccgcctcgg

SEQ ID NO: 979 - protein, 244 aa, synthetic construct
  REGION 1..244: note = source = /note="Description of Artificial Sequence: Synthetic polypeptide"
QVQLVESGGGLVQPGRSLRLSCAASGFTFDDYAMHWVRQAPGKGLEWVSGISWNSGSIGYADSVKGRFTISRDNAKNSLYLQMNSLRAEDTALYYCSVHSFLAYWGQGTLVTVSSASGGGGSGGRASGGGGSDIVMTQTPLSLPVTPGEPASISCRSSQSLLHSNGYNYLDWYLQKPGQSPQLLIYLGSNRASGVPDRFSGSGSGTDFTLKISRVEAEDVGVYYCMQALQTPYTFGQGTKVEIK

SEQ ID NO: 980 - DNA, 732 bp, synthetic construct
  misc_feature 1..732: note = source = /note="Description of Artificial Sequence: Synthetic polynucleotide"
  source 1..732: mol_type = other DNA
caagtgcaactcgtcgaatccggtggaggtctggtccaacctggtagaagcctgagactgtcgtgtgcggccagcggattcacctttgatgactatgctatgcactgggtgcggcaggccccaggaaagggcctggaatgggtgtcgggaattagctggaactccgggtccattggctacgccgactccgtgaagggccgcttcaccatctcccgcgacaacgcaaagaactccctgtacttgcaaatgaactcgctcagggctgaggataccgcgctgtactactgctccgtgcattccttcctggcctactggggacagggaactctggtcaccgtgtcgagcgcctccggcggcgggggctcgggtggacgggcctcgggcggaggggggtccgacatcgtgatgacccagaccccgctgagcttgcccgtgactcccggagagcctgcatccatctcctgccggtcatcccagtcccttctccactccaacggatacaactacctcgactggtacctccagaagccgggacagagccctcagcttctgatctacctggggtcaaatagagcctcaggagtgccggatcggttcagcggatctggttcgggaactgatttcactctgaagatttcccgcgtggaagccgaggacgtgggcgtctactactgtatgcaggcgctgcagaccccctataccttcggccaagggacgaaagtggagatcaag

SEQ ID NO: 981 - protein, 115 aa, synthetic construct
  REGION 1..115: note = source = /note="Description of Artificial Sequence: Synthetic polypeptide"
QVQLVESGGGLVQPGRSLRLSCAASGFTFDDYAMHWVRQAPGKGLEWVSGISWNSGSIGYADSVKGRFTISRDNAKNSLYLQMNSLRAEDTALYYCSVHSFLAYWGQGTLVTVSS

SEQ ID NO: 982 - protein, 112 aa, synthetic construct
  REGION 1..112: note = source = /note="Description of Artificial Sequence: Synthetic polypeptide"
DIVMTQTPLSLPVTPGEPASISCRSSQSLLHSNGYNYLDWYLQKPGQSPQLLIYLGSNRASGVPDRFSGSGSGTDFTLKISRVEAEDVGVYYCMQALQTPYTFGQGTKVEIK

SEQ ID NO: 983 - protein, 488 aa, synthetic construct
  REGION 1..488: note = source = /note="Description of Artificial Sequence: Synthetic polypeptide"
MALPVTALLLPLALLLHAARPQVQLVESGGGLVQPGRSLRLSCAASGFTFDDYAMHWVRQAPGKGLEWVSGISWNSGSIGYADSVKGRFTISRDNAKNSLYLQMNSLRAEDTALYYCSVHSFLAYWGQGTLVTVSSASGGGGSGGRASGGGGSDIVMTQTPLSLPVTPGEPASISCRSSQSLLHSNGYNYLDWYLQKPGQSPQLLIYLGSNRASGVPDRFSGSGSGTDFTLKISRVEAEDVGVYYCMQALQTPYTFGQGTKVEIKTTTPAPRPPTPAPTIASQPLSLRPEACRPAAGGAVHTRGLDFACDIYIWAPLAGTCGVLLLSLVITLYCKRGRKKLLYIFKQPFMRPVQTTQEEDGCSCRFPEEEEGGCELRVKFSRSADAPAYKQGQNQLYNELNLGRREEYDVLDKRRGRDPEMGGKPRRKNPQEGLYNELQKDKMAEAYSEIGMKGERRRGKGHDGLYQGLSTATKDTYDALHMQALPPR

SEQ ID NO: 984 - DNA, 1464 bp, synthetic construct
  misc_feature 1..1464: note = source = /note="Description of Artificial Sequence: Synthetic polynucleotide"
  source 1..1464: mol_type = other DNA
atggccctccctgtcaccgccctgctgcttccgctggctcttctgctccacgccgctcggccccaagtgcaactcgtcgaatccggtggaggtctggtccaacctggtagaagcctgagactgtcgtgtgcggccagcggattcacctttgatgactatgctatgcactgggtgcggcaggccccaggaaagggcctggaatgggtgtcgggaattagctggaactccgggtccattggctacgccgactccgtgaagggccgcttcaccatctcccgcgacaacgcaaagaactccctgtacttgcaaatgaactcgctcagggctgaggataccgcgctgtactactgctccgtgcattccttcctggcctactggggacagggaactctggtcaccgtgtcgagcgcctccggcggcgggggctcgggtggacgggcctcgggcggaggggggtccgacatcgtgatgacccagaccccgctgagcttgcccgtgactcccggagagcctgcatccatctcctgccggtcatcccagtcccttctccactccaacggatacaactacctcgactggtacctccagaagccgggacagagccctcagcttctgatctacctggggtcaaatagagcctcaggagtgccggatcggttcagcggatctggttcgggaactgatttcactctgaagatttcccgcgtggaagccgaggacgtgggcgtctactactgtatgcaggcgctgcagaccccctataccttcggccaagggacgaaagtggagatcaagaccactaccccagcaccgaggccacccaccccggctcctaccatcgcctcccagcctctgtccctgcgtccggaggcatgtagacccgcagctggtggggccgtgcatacccggggtcttgacttcgcctgcgatatctacatttgggcccctctggctggtacttgcggggtcctgctgctttcactcgtgatcactctttactgtaagcgcggtcggaagaagctgctgtacatctttaagcaacccttcatgaggcctgtgcagactactcaagaggaggacggctgttcatgccggttcccagaggaggaggaaggcggctgcgaactgcgcgtgaaattcagccgcagcgcagatgctccagcctacaagcaggggcagaaccagctctacaacgaactcaatcttggtcggagagaggagtacgacgtgctggacaagcggagaggacgggacccagaaatgggcgggaagccgcgcagaaagaatccccaagagggcctgtacaacgagctccaaaaggataagatggcagaagcctatagcgagattggtatgaaaggggaacgcagaagaggcaaaggccacgacggactgtaccagggactcagcaccgccaccaaggacacctatgacgctcttcacatgcaggccctgccgcctcgg

SEQ ID NO: 985 - protein, 243 aa, synthetic construct
  REGION 1..243: note = source = /note="Description of Artificial Sequence: Synthetic polypeptide"
EVQLLESGGGLVQPGGSLRLSCAVSGFALSNHGMSWVRRAPGKGLEWVSGIVYSGSTYYAASVKGRFTISRDNSRNTLYLQMNSLRPEDTAIYYCSAHGGESDVWGQGTTVTVSSASGGGGSGGRASGGGGSDIVMTQTPLSLSVTPGQPASISCKSSQSLLRNDGKTPLYWYLQKAGQPPQLLIYEVSNRFSGVPDRFSGSGSGTDFTLKISRVEAEDVGAYYCMQNIQFPSFGGGTKLEIK

SEQ ID NO: 986 - DNA, 729 bp, synthetic construct
  misc_feature 1..729: note = source = /note="Description of Artificial Sequence: Synthetic polynucleotide"
  source 1..729: mol_type = other DNA
gaagtgcaattgttggaatctggaggaggacttgtgcagcctggaggatcactgagactttcgtgtgcggtgtcaggcttcgccctgagcaaccacggcatgagctgggtgcggagagccccggggaagggtctggaatgggtgtccgggatcgtctactccggttcaacttactacgccgcaagcgtgaagggtcgcttcaccatttcccgcgataactcccggaacaccctgtacctccaaatgaactccctgcggcccgaggacaccgccatctactactgttccgcgcatggaggagagtccgatgtctggggacagggcactaccgtgaccgtgtcgagcgcctcggggggaggaggctccggcggtcgcgcctccggggggggtggcagcgacattgtgatgacgcagactccactctcgctgtccgtgaccccgggacagcccgcgtccatctcgtgcaagagctcccagagcctgctgaggaacgacggaaagactcctctgtattggtacctccagaaggctggacagcccccgcaactgctcatctacgaagtgtcaaatcgcttctccggggtgccggatcggttttccggctcgggatcgggcaccgacttcaccctgaaaatctccagggtcgaggccgaggacgtgggagcctactactgcatgcaaaacatccagttcccttccttcggcggcggcacaaagctggagattaag

SEQ ID NO: 987 - protein, 115 aa, synthetic construct
  REGION 1..115: note = source = /note="Description of Artificial Sequence: Synthetic polypeptide"
EVQLLESGGGLVQPGGSLRLSCAVSGFALSNHGMSWVRRAPGKGLEWVSGIVYSGSTYYAASVKGRFTISRDNSRNTLYLQMNSLRPEDTAIYYCSAHGGESDVWGQGTTVTVSS

SEQ ID NO: 988 - protein, 111 aa, synthetic construct
  REGION 1..111: note = source = /note="Description of Artificial Sequence: Synthetic polypeptide"
DIVMTQTPLSLSVTPGQPASISCKSSQSLLRNDGKTPLYWYLQKAGQPPQLLIYEVSNRFSGVPDRFSGSGSGTDFTLKISRVEAEDVGAYYCMQNIQFPSFGGGTKLEIK

SEQ ID NO: 989 - protein, 487 aa, synthetic construct
  REGION 1..487: note = source = /note="Description of Artificial Sequence: Synthetic polypeptide"
MALPVTALLLPLALLLHAARPEVQLLESGGGLVQPGGSLRLSCAVSGFALSNHGMSWVRRAPGKGLEWVSGIVYSGSTYYAASVKGRFTISRDNSRNTLYLQMNSLRPEDTAIYYCSAHGGESDVWGQGTTVTVSSASGGGGSGGRASGGGGSDIVMTQTPLSLSVTPGQPASISCKSSQSLLRNDGKTPLYWYLQKAGQPPQLLIYEVSNRFSGVPDRFSGSGSGTDFTLKISRVEAEDVGAYYCMQNIQFPSFGGGTKLEIKTTTPAPRPPTPAPTIASQPLSLRPEACRPAAGGAVHTRGLDFACDIYIWAPLAGTCGVLLLSLVITLYCKRGRKKLLYIFKQPFMRPVQTTQEEDGCSCRFPEEEEGGCELRVKFSRSADAPAYKQGQNQLYNELNLGRREEYDVLDKRRGRDPEMGGKPRRKNPQEGLYNELQKDKMAEAYSEIGMKGERRRGKGHDGLYQGLSTATKDTYDALHMQALPPR

SEQ ID NO: 990 - DNA, 1461 bp, synthetic construct
  misc_feature 1..1461: note = source = /note="Description of Artificial Sequence: Synthetic polynucleotide"
  source 1..1461: mol_type = other DNA
atggccctccctgtcaccgccctgctgcttccgctggctcttctgctccacgccgctcggcccgaagtgcaattgttggaatctggaggaggacttgtgcagcctggaggatcactgagactttcgtgtgcggtgtcaggcttcgccctgagcaaccacggcatgagctgggtgcggagagccccggggaagggtctggaatgggtgtccgggatcgtctactccggttcaacttactacgccgcaagcgtgaagggtcgcttcaccatttcccgcgataactcccggaacaccctgtacctccaaatgaactccctgcggcccgaggacaccgccatctactactgttccgcgcatggaggagagtccgatgtctggggacagggcactaccgtgaccgtgtcgagcgcctcggggggaggaggctccggcggtcgcgcctccggggggggtggcagcgacattgtgatgacgcagactccactctcgctgtccgtgaccccgggacagcccgcgtccatctcgtgcaagagctcccagagcctgctgaggaacgacggaaagactcctctgtattggtacctccagaaggctggacagcccccgcaactgctcatctacgaagtgtcaaatcgcttctccggggtgccggatcggttttccggctcgggatcgggcaccgacttcaccctgaaaatctccagggtcgaggccgaggacgtgggagcctactactgcatgcaaaacatccagttcccttccttcggcggcggcacaaagctggagattaagaccactaccccagcaccgaggccacccaccccggctcctaccatcgcctcccagcctctgtccctgcgtccggaggcatgtagacccgcagctggtggggccgtgcatacccggggtcttgacttcgcctgcgatatctacatttgggcccctctggctggtacttgcggggtcctgctgctttcactcgtgatcactctttactgtaagcgcggtcggaagaagctgctgtacatctttaagcaacccttcatgaggcctgtgcagactactcaagaggaggacggctgttcatgccggttcccagaggaggaggaaggcggctgcgaactgcgcgtgaaattcagccgcagcgcagatgctccagcctacaagcaggggcagaaccagctctacaacgaactcaatcttggtcggagagaggagtacgacgtgctggacaagcggagaggacgggacccagaaatgggcgggaagccgcgcagaaagaatccccaagagggcctgtacaacgagctccaaaaggataagatggcagaagcctatagcgagattggtatgaaaggggaacgcagaagaggcaaaggccacgacggactgtaccagggactcagcaccgccaccaaggacacctatgacgctcttcacatgcaggccctgccgcctcgg

SEQ ID NO: 991 - protein, 249 aa, synthetic construct
  REGION 1..249: note = source = /note="Description of Artificial Sequence: Synthetic polypeptide"
QVQLVQSGAEVRKTGASVKVSCKASGYIFDNFGINWVRQAPGQGLEWMGWINPKNNNTNYAQKFQGRVTITADESTNTAYMEVSSLRSEDTAVYYCARGPYYYQSYMDVWGQGTMVTVSSASGGGGSGGRASGGGGSDIVMTQTPLSLPVTPGEPASISCRSSQSLLHSNGYNYLNWYLQKPGQSPQLLIYLGSKRASGVPDRFSGSGSGTDFTLHITRVGAEDVGVYYCMQALQTPYTFGQGTKLEIK

SEQ ID NO: 992 - DNA, 747 bp, synthetic construct
  misc_feature 1..747: note = source = /note="Description of Artificial Sequence: Synthetic polynucleotide"
  source 1..747: mol_type = other DNA
caagtccaactcgtccagtccggcgcagaagtcagaaaaaccggtgctagcgtgaaagtgtcctgcaaggcctccggctacattttcgataacttcggaatcaactgggtcagacaggccccgggccaggggctggaatggatgggatggatcaaccccaagaacaacaacaccaactacgcacagaagttccagggccgcgtgactatcaccgccgatgaatcgaccaataccgcctacatggaggtgtcctccctgcggtcggaggacactgccgtgtattactgcgcgaggggcccatactactaccaaagctacatggacgtctggggacagggaaccatggtgaccgtgtcatccgcctccggtggtggaggctccggggggcgggcttcaggaggcggaggaagcgatattgtgatgacccagactccgcttagcctgcccgtgactcctggagaaccggcctccatttcctgccggtcctcgcaatcactcctgcattccaacggttacaactacctgaattggtacctccagaagcctggccagtcgccccagttgctgatctatctgggctcgaagcgcgcctccggggtgcctgaccggtttagcggatctgggagcggcacggacttcactctccacatcacccgcgtgggagcggaggacgtgggagtgtactactgtatgcaggcgctgcagactccgtacacattcggacagggcaccaagctggagatcaag

SEQ ID NO: 993 - protein, 120 aa, synthetic construct
  REGION 1..120: note = source = /note="Description of Artificial Sequence: Synthetic polypeptide"
QVQLVQSGAEVRKTGASVKVSCKASGYIFDNFGINWVRQAPGQGLEWMGWINPKNNNTNYAQKFQGRVTITADESTNTAYMEVSSLRSEDTAVYYCARGPYYYQSYMDVWGQGTMVTVSS

SEQ ID NO: 994 - protein, 112 aa, synthetic construct
  REGION 1..112: note = source = /note="Description of Artificial Sequence: Synthetic polypeptide"
DIVMTQTPLSLPVTPGEPASISCRSSQSLLHSNGYNYLNWYLQKPGQSPQLLIYLGSKRASGVPDRFSGSGSGTDFTLHITRVGAEDVGVYYCMQALQTPYTFGQGTKLEIK

SEQ ID NO: 995 - protein, 493 aa, synthetic construct
  REGION 1..493: note = source = /note="Description of Artificial Sequence: Synthetic polypeptide"
MALPVTALLLPLALLLHAARPQVQLVQSGAEVRKTGASVKVSCKASGYIFDNFGINWVRQAPGQGLEWMGWINPKNNNTNYAQKFQGRVTITADESTNTAYMEVSSLRSEDTAVYYCARGPYYYQSYMDVWGQGTMVTVSSASGGGGSGGRASGGGGSDIVMTQTPLSLPVTPGEPASISCRSSQSLLHSNGYNYLNWYLQKPGQSPQLLIYLGSKRASGVPDRFSGSGSGTDFTLHITRVGAEDVGVYYCMQALQTPYTFGQGTKLEIKTTTPAPRPPTPAPTIASQPLSLRPEACRPAAGGAVHTRGLDFACDIYIWAPLAGTCGVLLLSLVITLYCKRGRKKLLYIFKQPFMRPVQTTQEEDGCSCRFPEEEEGGCELRVKFSRSADAPAYKQGQNQLYNELNLGRREEYDVLDKRRGRDPEMGGKPRRKNPQEGLYNELQKDKMAEAYSEIGMKGERRRGKGHDGLYQGLSTATKDTYDALHMQALPPR

SEQ ID NO: 996 - DNA, 1479 bp, synthetic construct
  misc_feature 1..1479: note = source = /note="Description of Artificial Sequence: Synthetic polynucleotide"
  source 1..1479: mol_type = other DNA
atggccctccctgtcaccgccctgctgcttccgctggctcttctgctccacgccgctcggccccaagtccaactcgtccagtccggcgcagaagtcagaaaaaccggtgctagcgtgaaagtgtcctgcaaggcctccggctacattttcgataacttcggaatcaactgggtcagacaggccccgggccaggggctggaatggatgggatggatcaaccccaagaacaacaacaccaactacgcacagaagttccagggccgcgtgactatcaccgccgatgaatcgaccaataccgcctacatggaggtgtcctccctgcggtcggaggacactgccgtgtattactgcgcgaggggcccatactactaccaaagctacatggacgtctggggacagggaaccatggtgaccgtgtcatccgcctccggtggtggaggctccggggggcgggcttcaggaggcggaggaagcgatattgtgatgacccagactccgcttagcctgcccgtgactcctggagaaccggcctccatttcctgccggtcctcgcaatcactcctgcattccaacggttacaactacctgaattggtacctccagaagcctggccagtcgccccagttgctgatctatctgggctcgaagcgcgcctccggggtgcctgaccggtttagcggatctgggagcggcacggacttcactctccacatcacccgcgtgggagcggaggacgtgggagtgtactactgtatgcaggcgctgcagactccgtacacattcggacagggcaccaagctggagatcaagaccactaccccagcaccgaggccacccaccccggctcctaccatcgcctcccagcctctgtccctgcgtccggaggcatgtagacccgcagctggtggggccgtgcatacccggggtcttgacttcgcctgcgatatctacatttgggcccctctggctggtacttgcggggtcctgctgctttcactcgtgatcactctttactgtaagcgcggtcggaagaagctgctgtacatctttaagcaacccttcatgaggcctgtgcagactactcaagaggaggacggctgttcatgccggttcccagaggaggaggaaggcggctgcgaactgcgcgtgaaattcagccgcagcgcagatgctccagcctacaagcaggggcagaaccagctctacaacgaactcaatcttggtcggagagaggagtacgacgtgctggacaagcggagaggacgggacccagaaatgggcgggaagccgcgcagaaagaatccccaagagggcctgtacaacgagctccaaaaggataagatggcagaagcctatagcgagattggtatgaaaggggaacgcagaagaggcaaaggccacgacggactgtaccagggactcagcaccgccaccaaggacacctatgacgctcttcacatgcaggccctgccgcctcgg

SEQ ID NO: 997 - protein, 246 aa, synthetic construct
  REGION 1..246: note = source = /note="Description of Artificial Sequence: Synthetic polypeptide"
QVQLQESGGGLVQPGGSLRLSCAASGFTFSSDAMTWVRQAPGKGLEWVSVISGSGGTTYYADSVKGRFTISRDNSKNTLYLQMNSLRAEDTAVYYCAKLDSSGYYYARGPRYWGQGTLVTVSSASGGGGSGGRASGGGGSDIQLTQSPSSLSASVGDRVTITCRASQSISSYLNWYQQKPGKAPKLLIYGASTLASGVPARFSGSGSGTHFTLTINSLQSEDSATYYCQQSYKRASFGQGTKVEIK

SEQ ID NO: 998 - DNA, 738 bp, synthetic construct
  misc_feature 1..738: note = source = /note="Description of Artificial Sequence: Synthetic polynucleotide"
  source 1..738: mol_type = other DNA
caagtgcaacttcaagaatcaggcggaggactcgtgcagcccggaggatcattgcggctctcgtgcgccgcctcgggcttcaccttctcgagcgacgccatgacctgggtccgccaggccccggggaaggggctggaatgggtgtctgtgatttccggctccgggggaactacgtactacgccgattccgtgaaaggtcgcttcactatctcccgggacaacagcaagaacaccctttatctgcaaatgaattccctccgcgccgaggacaccgccgtgtactactgcgccaagctggactcctcgggctactactatgcccggggtccgagatactggggacagggaaccctcgtgaccgtgtcctccgcgtccggcggaggagggtcgggagggcgggcctccggcggcggcggttcggacatccagctgacccagtccccatcctcactgagcgcaagcgtgggcgacagagtcaccattacatgcagggcgtcccagagcatcagctcctacctgaactggtaccaacagaagcctggaaaggctcctaagctgttgatctacggggcttcgaccctggcatccggggtgcccgcgaggtttagcggaagcggtagcggcactcacttcactctgaccattaacagcctccagtccgaggattcagccacttactactgtcagcagtcctacaagcgggccagcttcggacagggcactaaggtcgagatcaag

SEQ ID NO: 999 - protein, 123 aa, synthetic construct
  REGION 1..123: note = source = /note="Description of Artificial Sequence: Synthetic polypeptide"
QVQLQESGGGLVQPGGSLRLSCAASGFTFSSDAMTWVRQAPGKGLEWVSVISGSGGTTYYADSVKGRFTISRDNSKNTLYLQMNSLRAEDTAVYYCAKLDSSGYYYARGPRYWGQGTLVTVSS

SEQ ID NO: 1000 - protein, 106 aa, synthetic construct
  REGION 1..106: note = source = /note="Description of Artificial Sequence: Synthetic polypeptide"
DIQLTQSPSSLSASVGDRVTITCRASQSISSYLNWYQQKPGKAPKLLIYGASTLASGVPARFSGSGSGTHFTLTINSLQSEDSATYYCQQSYKRASFGQGTKVEIK

SEQ ID NO: 1001 - protein, 490 aa, synthetic construct
  REGION 1..490: note = source = /note="Description of Artificial Sequence: Synthetic polypeptide"
MALPVTALLLPLALLLHAARPQVQLQESGGGLVQPGGSLRLSCAASGFTFSSDAMTWVRQAPGKGLEWVSVISGSGGTTYYADSVKGRFTISRDNSKNTLYLQMNSLRAEDTAVYYCAKLDSSGYYYARGPRYWGQGTLVTVSSASGGGGSGGRASGGGGSDIQLTQSPSSLSASVGDRVTITCRASQSISSYLNWYQQKPGKAPKLLIYGASTLASGVPARFSGSGSGTHFTLTINSLQSEDSATYYCQQSYKRASFGQGTKVEIKTTTPAPRPPTPAPTIASQPLSLRPEACRPAAGGAVHTRGLDFACDIYIWAPLAGTCGVLLLSLVITLYCKRGRKKLLYIFKQPFMRPVQTTQEEDGCSCRFPEEEEGGCELRVKFSRSADAPAYKQGQNQLYNELNLGRREEYDVLDKRRGRDPEMGGKPRRKNPQEGLYNELQKDKMAEAYSEIGMKGERRRGKGHDGLYQGLSTATKDTYDALHMQALPPR

SEQ ID NO: 1002 - DNA, 1470 bp, synthetic construct
  misc_feature 1..1470: note = source = /note="Description of Artificial Sequence: Synthetic polynucleotide"
  source 1..1470: mol_type = other DNA
atggccctccctgtcaccgccctgctgcttccgctggctcttctgctccacgccgctcggccccaagtgcaacttcaagaatcaggcggaggactcgtgcagcccggaggatcattgcggctctcgtgcgccgcctcgggcttcaccttctcgagcgacgccatgacctgggtccgccaggccccggggaaggggctggaatgggtgtctgtgatttccggctccgggggaactacgtactacgccgattccgtgaaaggtcgcttcactatctcccgggacaacagcaagaacaccctttatctgcaaatgaattccctccgcgccgaggacaccgccgtgtactactgcgccaagctggactcctcgggctactactatgcccggggtccgagatactggggacagggaaccctcgtgaccgtgtcctccgcgtccggcggaggagggtcgggagggcgggcctccggcggcggcggttcggacatccagctgacccagtccccatcctcactgagcgcaagcgtgggcgacagagtcaccattacatgcagggcgtcccagagcatcagctcctacctgaactggtaccaacagaagcctggaaaggctcctaagctgttgatctacggggcttcgaccctggcatccggggtgcccgcgaggtttagcggaagcggtagcggcactcacttcactctgaccattaacagcctccagtccgaggattcagccacttactactgtcagcagtcctacaagcgggccagcttcggacagggcactaaggtcgagatcaagaccactaccccagcaccgaggccacccaccccggctcctaccatcgcctcccagcctctgtccctgcgtccggaggcatgtagacccgcagctggtggggccgtgcatacccggggtcttgacttcgcctgcgatatctacatttgggcccctctggctggtacttgcggggtcctgctgctttcactcgtgatcactctttactgtaagcgcggtcggaagaagctgctgtacatctttaagcaacccttcatgaggcctgtgcagactactcaagaggaggacggctgttcatgccggttcccagaggaggaggaaggcggctgcgaactgcgcgtgaaattcagccgcagcgcagatgctccagcctacaagcaggggcagaaccagctctacaacgaactcaatcttggtcggagagaggagtacgacgtgctggacaagcggagaggacgggacccagaaatgggcgggaagccgcgcagaaagaatccccaagagggcctgtacaacgagctccaaaaggataagatggcagaagcctatagcgagattggtatgaaaggggaacgcagaagaggcaaaggccacgacggactgtaccagggactcagcaccgccaccaaggacacctatgacgctcttcacatgcaggccctgccgcctcgg

SEQ ID NO: 1003 - protein, 247 aa, synthetic construct
  REGION 1..247: note = source = /note="Description of Artificial Sequence: Synthetic polypeptide"
QVQLVQSGAEVKKPGASVKVSCKASGYTFSNYGITWVRQAPGQGLEWMGWISAYNGNTNYAQKFQGRVTMTRNTSISTAYMELSSLRSEDTAVYYCARGPYYYYMDVWGKGTMVTVSSASGGGGSGGRASGGGGSEIVMTQSPLSLPVTPGEPASISCRSSQSLLYSNGYNYVDWYLQKPGQSPQLLIYLGSNRASGVPDRFSGSGSGTDFKLQISRVEAEDVGIYYCMQGRQFPYSFGQGTKVEIK

SEQ ID NO: 1004 - DNA, 741 bp, synthetic construct
  misc_feature 1..741: note = source = /note="Description of Artificial Sequence: Synthetic polynucleotide"
  source 1..741: mol_type = other DNA
caagtccaactggtccagagcggtgcagaagtgaagaagcccggagcgagcgtgaaagtgtcctgcaaggcttccgggtacaccttctccaactacggcatcacttgggtgcgccaggccccgggacagggcctggaatggatggggtggatttccgcgtacaacggcaatacgaactacgctcagaagttccagggtagagtgaccatgactaggaacacctccatttccaccgcctacatggaactgtcctccctgcggagcgaggacaccgccgtgtactattgcgcccggggaccatactactactacatggatgtctgggggaaggggactatggtcaccgtgtcatccgcctcgggaggcggcggatcaggaggacgcgcctctggtggtggaggatcggagatcgtgatgacccagagccctctctccttgcccgtgactcctggggagcccgcatccatttcatgccggagctcccagtcacttctctactccaacggctataactacgtggattggtacctccaaaagccgggccagagcccgcagctgctgatctacctgggctcgaacagggccagcggagtgcctgaccggttctccgggtcgggaagcgggaccgacttcaagctgcaaatctcgagagtggaggccgaggacgtgggaatctactactgtatgcagggccgccagtttccgtactcgttcggacagggcaccaaagtggaaatcaag

SEQ ID NO: 1005 - protein, 118 aa, synthetic construct
  REGION 1..118: note = source = /note="Description of Artificial Sequence: Synthetic polypeptide"
QVQLVQSGAEVKKPGASVKVSCKASGYTFSNYGITWVRQAPGQGLEWMGWISAYNGNTNYAQKFQGRVTMTRNTSISTAYMELSSLRSEDTAVYYCARGPYYYYMDVWGKGTMVTVSS

SEQ ID NO: 1006 - protein, 112 aa, synthetic construct
  REGION 1..112: note = source = /note="Description of Artificial Sequence: Synthetic polypeptide"
EIVMTQSPLSLPVTPGEPASISCRSSQSLLYSNGYNYVDWYLQKPGQSPQLLIYLGSNRASGVPDRFSGSGSGTDFKLQISRVEAEDVGIYYCMQGRQFPYSFGQGTKVEIK

SEQ ID NO: 1007 - protein, 491 aa, synthetic construct
  REGION 1..491: note = source = /note="Description of Artificial Sequence: Synthetic polypeptide"
MALPVTALLLPLALLLHAARPQVQLVQSGAEVKKPGASVKVSCKASGYTFSNYGITWVRQAPGQGLEWMGWISAYNGNTNYAQKFQGRVTMTRNTSISTAYMELSSLRSEDTAVYYCARGPYYYYMDVWGKGTMVTVSSASGGGGSGGRASGGGGSEIVMTQSPLSLPVTPGEPASISCRSSQSLLYSNGYNYVDWYLQKPGQSPQLLIYLGSNRASGVPDRFSGSGSGTDFKLQISRVEAEDVGIYYCMQGRQFPYSFGQGTKVEIKTTTPAPRPPTPAPTIASQPLSLRPEACRPAAGGAVHTRGLDFACDIYIWAPLAGTCGVLLLSLVITLYCKRGRKKLLYIFKQPFMRPVQTTQEEDGCSCRFPEEEEGGCELRVKFSRSADAPAYKQGQNQLYNELNLGRREEYDVLDKRRGRDPEMGGKPRRKNPQEGLYNELQKDKMAEAYSEIGMKGERRRGKGHDGLYQGLSTATKDTYDALHMQALPPR

SEQ ID NO: 1008 - DNA, 1473 bp, synthetic construct
  misc_feature 1..1473: note = source = /note="Description of Artificial Sequence: Synthetic polynucleotide"
  source 1..1473: mol_type = other DNA
atggccctccctgtcaccgccctgctgcttccgctggctcttctgctccacgccgctcggccccaagtccaactggtccagagcggtgcagaagtgaagaagcccggagcgagcgtgaaagtgtcctgcaaggcttccgggtacaccttctccaactacggcatcacttgggtgcgccaggccccgggacagggcctggaatggatggggtggatttccgcgtacaacggcaatacgaactacgctcagaagttccagggtagagtgaccatgactaggaacacctccatttccaccgcctacatggaactgtcctccctgcggagcgaggacaccgccgtgtactattgcgcccggggaccatactactactacatggatgtctgggggaaggggactatggtcaccgtgtcatccgcctcgggaggcggcggatcaggaggacgcgcctctggtggtggaggatcggagatcgtgatgacccagagccctctctccttgcccgtgactcctggggagcccgcatccatttcatgccggagctcccagtcacttctctactccaacggctataactacgtggattggtacctccaaaagccgggccagagcccgcagctgctgatctacctgggctcgaacagggccagcggagtgcctgaccggttctccgggtcgggaagcgggaccgacttcaagctgcaaatctcgagagtggaggccgaggacgtgggaatctactactgtatgcagggccgccagtttccgtactcgttcggacagggcaccaaagtggaaatcaagaccactaccccagcaccgaggccacccaccccggctcctaccatcgcctcccagcctctgtccctgcgtccggaggcatgtagacccgcagctggtggggccgtgcatacccggggtcttgacttcgcctgcgatatctacatttgggcccctctggctggtacttgcggggtcctgctgctttcactcgtgatcactctttactgtaagcgcggtcggaagaagctgctgtacatctttaagcaacccttcatgaggcctgtgcagactactcaagaggaggacggctgttcatgccggttcccagaggaggaggaaggcggctgcgaactgcgcgtgaaattcagccgcagcgcagatgctccagcctacaagcaggggcagaaccagctctacaacgaactcaatcttggtcggagagaggagtacgacgtgctggacaagcggagaggacgggacccagaaatgggcgggaagccgcgcagaaagaatccccaagagggcctgtacaacgagctccaaaaggataagatggcagaagcctatagcgagattggtatgaaaggggaacgcagaagaggcaaaggccacgacggactgtaccagggactcagcaccgccaccaaggacacctatgacgctcttcacatgcaggccctgccgcctcgg

SEQ ID NO: 1009 - protein, 238 aa, synthetic construct
  REGION 1..238: note = source = /note="Description of Artificial Sequence: Synthetic polypeptide"
EVQLLETGGGLVQPGGSLRLSCAVSGFALSNHGMSWVRRAPGKGLEWVSGIVYSGSTYYAASVKGRFTISRDNSRNTLYLQMNSLRPEDTAIYYCSAHGGESDVWGQGTTVTVSSASGGGGSGGRASGGGGSEIVLTQSPATLSVSPGESATLSCRASQSVSSNLAWYQQKPGQAPRLLIYGASTRASGIPDRFSGSGSGTDFTLTISSLQAEDVAVYYCQQYGSSLTFGGGTKVEIK

SEQ ID NO: 1010 - DNA, 714 bp, synthetic construct
  misc_feature 1..714: note = source = /note="Description of Artificial Sequence: Synthetic polynucleotide"
  source 1..714: mol_type = other DNA
gaagtgcaattgctcgaaactggaggaggtctggtgcaacctggaggatcacttcgcctgtcctgcgccgtgtcgggctttgccctgtccaaccatggaatgagctgggtccgccgcgcgccggggaagggcctcgaatgggtgtccggcatcgtctactccggctccacctactacgccgcgtccgtgaagggccggttcacgatttcacgggacaactcgcggaacaccctgtacctccaaatgaattcccttcggccggaggatactgccatctactactgctccgcccacggtggcgaatccgacgtctggggccagggaaccaccgtgaccgtgtccagcgcgtccgggggaggaggaagcgggggtagagcatcgggtggaggcggatcagagatcgtgctgacccagtcccccgccaccttgagcgtgtcaccaggagagtccgccaccctgtcatgccgcgccagccagtccgtgtcctccaacctggcttggtaccagcagaagccggggcaggcccctagactcctgatctatggggcgtcgacccgggcatctggaattcccgataggttcagcggatcgggctcgggcactgacttcactctgaccatctcctcgctgcaagccgaggacgtggctgtgtactactgtcagcagtacggaagctccctgactttcggtggcgggaccaaagtcgagattaag

SEQ ID NO: 1011 - protein, 115 aa, synthetic construct
  REGION 1..115: note = source = /note="Description of Artificial Sequence: Synthetic polypeptide"
EVQLLETGGGLVQPGGSLRLSCAVSGFALSNHGMSWVRRAPGKGLEWVSGIVYSGSTYYAASVKGRFTISRDNSRNTLYLQMNSLRPEDTAIYYCSAHGGESDVWGQGTTVTVSS

SEQ ID NO: 1012 - protein, 106 aa, synthetic construct
  REGION 1..106: note = source = /note="Description of Artificial Sequence: Synthetic polypeptide"
EIVLTQSPATLSVSPGESATLSCRASQSVSSNLAWYQQKPGQAPRLLIYGASTRASGIPDRFSGSGSGTDFTLTISSLQAEDVAVYYCQQYGSSLTFGGGTKVEIK

SEQ ID NO: 1013 - protein, 482 aa, synthetic construct
  REGION 1..482: note = source = /note="Description of Artificial Sequence: Synthetic polypeptide"
MALPVTALLLPLALLLHAARPEVQLLETGGGLVQPGGSLRLSCAVSGFALSNHGMSWVRRAPGKGLEWVSGIVYSGSTYYAASVKGRFTISRDNSRNTLYLQMNSLRPEDTAIYYCSAHGGESDVWGQGTTVTVSSASGGGGSGGRASGGGGSEIVLTQSPATLSVSPGESATLSCRASQSVSSNLAWYQQKPGQAPRLLIYGASTRASGIPDRFSGSGSGTDFTLTISSLQAEDVAVYYCQQYGSSLTFGGGTKVEIKTTTPAPRPPTPAPTIASQPLSLRPEACRPAAGGAVHTRGLDFACDIYIWAPLAGTCGVLLLSLVITLYCKRGRKKLLYIFKQPFMRPVQTTQEEDGCSCRFPEEEEGGCELRVKFSRSADAPAYKQGQNQLYNELNLGRREEYDVLDKRRGRDPEMGGKPRRKNPQEGLYNELQKDKMAEAYSEIGMKGERRRGKGHDGLYQGLSTATKDTYDALHMQALPPR

SEQ ID NO: 1014 - DNA, 1446 bp, synthetic construct
  misc_feature 1..1446: note = source = /note="Description of Artificial Sequence: Synthetic polynucleotide"
  source 1..1446: mol_type = other DNA
atggccctccctgtcaccgccctgctgcttccgctggctcttctgctccacgccgctcggcccgaagtgcaattgctcgaaactggaggaggtctggtgcaacctggaggatcacttcgcctgtcctgcgccgtgtcgggctttgccctgtccaaccatggaatgagctgggtccgccgcgcgccggggaagggcctcgaatgggtgtccggcatcgtctactccggctccacctactacgccgcgtccgtgaagggccggttcacgatttcacgggacaactcgcggaacaccctgtacctccaaatgaattcccttcggccggaggatactgccatctactactgctccgcccacggtggcgaatccgacgtctggggccagggaaccaccgtgaccgtgtccagcgcgtccgggggaggaggaagcgggggtagagcatcgggtggaggcggatcagagatcgtgctgacccagtcccccgccaccttgagcgtgtcaccaggagagtccgccaccctgtcatgccgcgccagccagtccgtgtcctccaacctggcttggtaccagcagaagccggggcaggcccctagactcctgatctatggggcgtcgacccgggcatctggaattcccgataggttcagcggatcgggctcgggcactgacttcactctgaccatctcctcgctgcaagccgaggacgtggctgtgtactactgtcagcagtacggaagctccctgactttcggtggcgggaccaaagtcgagattaagaccactaccccagcaccgaggccacccaccccggctcctaccatcgcctcccagcctctgtccctgcgtccggaggcatgtagacccgcagctggtggggccgtgcatacccggggtcttgacttcgcctgcgatatctacatttgggcccctctggctggtacttgcggggtcctgctgctttcactcgtgatcactctttactgtaagcgcggtcggaagaagctgctgtacatctttaagcaacccttcatgaggcctgtgcagactactcaagaggaggacggctgttcatgccggttcccagaggaggaggaaggcggctgcgaactgcgcgtgaaattcagccgcagcgcagatgctccagcctacaagcaggggcagaaccagctctacaacgaactcaatcttggtcggagagaggagtacgacgtgctggacaagcggagaggacgggacccagaaatgggcgggaagccgcgcagaaagaatccccaagagggcctgtacaacgagctccaaaaggataagatggcagaagcctatagcgagattggtatgaaaggggaacgcagaagaggcaaaggccacgacggactgtaccagggactcagcaccgccaccaaggacacctatgacgctcttcacatgcaggccctgccgcctcgg

SEQ ID NO: 1015 - protein, 239 aa, synthetic construct
  REGION 1..239: note = source = /note="Description of Artificial Sequence: Synthetic polypeptide"
EVQLVETGGGLVQPGGSLRLSCAVSGFALSNHGMSWVRRAPGKGLEWVSGIVYSGSTYYAASVKGRFTISRDNSRNTLYLQMNSLRPEDTAIYYCSAHGGESDVWGQGTTVTVSSASGGGGSGGRASGGGGSEIVMTQSPATLSVSPGERATLSCRASQSVSSKLAWYQQKPGQAPRLLMYGASIRATGIPDRFSGSGSGTEFTLTISSLEPEDFAVYYCQQYGSSSWTFGQGTKVEIK

SEQ ID NO: 1016 - DNA, 717 bp, synthetic construct
  misc_feature 1..717: note = source = /note="Description of Artificial Sequence: Synthetic polynucleotide"
  source 1..717: mol_type = other DNA
gaagtgcaattggtggaaactggaggaggacttgtgcaacctggaggatcattgagactgagctgcgcagtgtcgggattcgccctgagcaaccatggaatgtcctgggtcagaagggcccctggaaaaggcctcgaatgggtgtcagggatcgtgtactccggttccacttactacgccgcctccgtgaaggggcgcttcactatctcacgggataactcccgcaataccctgtacctccaaatgaacagcctgcggccggaggataccgccatctactactgttccgcccacggtggagagtctgacgtctggggccagggaactaccgtgaccgtgtcctccgcgtccggcggtggagggagcggcggccgcgccagcggcggcggaggctccgagatcgtgatgacccagagccccgctactctgtcggtgtcgcccggagaaagggcgaccctgtcctgccgggcgtcgcagtccgtgagcagcaagctggcttggtaccagcagaagccgggccaggcaccacgcctgcttatgtacggtgcctccattcgggccaccggaatcccggaccggttctcggggtcggggtccggtaccgagttcacactgaccatttcctcgctcgagcccgaggactttgccgtctattactgccagcagtacggctcctcctcatggacgttcggccaggggaccaaggtcgaaatcaag

SEQ ID NO: 1017 - protein, 115 aa, synthetic construct
  REGION 1..115: note = source = /note="Description of Artificial Sequence: Synthetic polypeptide"
EVQLVETGGGLVQPGGSLRLSCAVSGFALSNHGMSWVRRAPGKGLEWVSGIVYSGSTYYAASVKGRFTISRDNSRNTLYLQMNSLRPEDTAIYYCSAHGGESDVWGQGTTVTVSS

SEQ ID NO: 1018 - protein, 107 aa, synthetic construct
  REGION 1..107: note = source = /note="Description of Artificial Sequence: Synthetic polypeptide"
EIVMTQSPATLSVSPGERATLSCRASQSVSSKLAWYQQKPGQAPRLLMYGASIRATGIPDRFSGSGSGTEFTLTISSLEPEDFAVYYCQQYGSSSWTFGQGTKVEIK

SEQ ID NO: 1019 - protein, 483 aa, synthetic construct
  REGION 1..483: note = source = /note="Description of Artificial Sequence: Synthetic polypeptide"
MALPVTALLLPLALLLHAARPEVQLVETGGGLVQPGGSLRLSCAVSGFALSNHGMSWVRRAPGKGLEWVSGIVYSGSTYYAASVKGRFTISRDNSRNTLYLQMNSLRPEDTAIYYCSAHGGESDVWGQGTTVTVSSASGGGGSGGRASGGGGSEIVMTQSPATLSVSPGERATLSCRASQSVSSKLAWYQQKPGQAPRLLMYGASIRATGIPDRFSGSGSGTEFTLTISSLEPEDFAVYYCQQYGSSSWTFGQGTKVEIKTTTPAPRPPTPAPTIASQPLSLRPEACRPAAGGAVHTRGLDFACDIYIWAPLAGTCGVLLLSLVITLYCKRGRKKLLYIFKQPFMRPVQTTQEEDGCSCRFPEEEEGGCELRVKFSRSADAPAYKQGQNQLYNELNLGRREEYDVLDKRRGRDPEMGGKPRRKNPQEGLYNELQKDKMAEAYSEIGMKGERRRGKGHDGLYQGLSTATKDTYDALHMQALPPR

SEQ ID NO: 1020 - DNA, 1449 bp, synthetic construct
  misc_feature 1..1449: note = source = /note="Description of Artificial Sequence: Synthetic polynucleotide"
  source 1..1449: mol_type = other DNA
atggccctccctgtcaccgccctgctgcttccgctggctcttctgctccacgccgctcggcccgaagtgcaattggtggaaactggaggaggacttgtgcaacctggaggatcattgagactgagctgcgcagtgtcgggattcgccctgagcaaccatggaatgtcctgggtcagaagggcccctggaaaaggcctcgaatgggtgtcagggatcgtgtactccggttccacttactacgccgcctccgtgaaggggcgcttcactatctcacgggataactcccgcaataccctgtacctccaaatgaacagcctgcggccggaggataccgccatctactactgttccgcccacggtggagagtctgacgtctggggccagggaactaccgtgaccgtgtcctccgcgtccggcggtggagggagcggcggccgcgccagcggcggcggaggctccgagatcgtgatgacccagagccccgctactctgtcggtgtcgcccggagaaagggcgaccctgtcctgccgggcgtcgcagtccgtgagcagcaagctggcttggtaccagcagaagccgggccaggcaccacgcctgcttatgtacggtgcctccattcgggccaccggaatcccggaccggttctcggggtcggggtccggtaccgagttcacactgaccatttcctcgctcgagcccgaggactttgccgtctattactgccagcagtacggctcctcctcatggacgttcggccaggggaccaaggtcgaaatcaagaccactaccccagcaccgaggccacccaccccggctcctaccatcgcctcccagcctctgtccctgcgtccggaggcatgtagacccgcagctggtggggccgtgcatacccggggtcttgacttcgcctgcgatatctacatttgggcccctctggctggtacttgcggggtcctgctgctttcactcgtgatcactctttactgtaagcgcggtcggaagaagctgctgtacatctttaagcaacccttcatgaggcctgtgcagactactcaagaggaggacggctgttcatgccggttcccagaggaggaggaaggcggctgcgaactgcgcgtgaaattcagccgcagcgcagatgctccagcctacaagcaggggcagaaccagctctacaacgaactcaatcttggtcggagagaggagtacgacgtgctggacaagcggagaggacgggacccagaaatgggcgggaagccgcgcagaaagaatccccaagagggcctgtacaacgagctccaaaaggataagatggcagaagcctatagcgagattggtatgaaaggggaacgcagaagaggcaaaggccacgacggactgtaccagggactcagcaccgccaccaaggacacctatgacgctcttcacatgcaggccctgccgcctcgg

SEQ ID NO: 1021 - protein, 241 aa, synthetic construct
  REGION 1..241: note = source = /note="Description of Artificial Sequence: Synthetic polypeptide"
EVQLVETGGGVVQPGGSLRLSCAVSGFALSNHGMSWVRRAPGKGLEWVSGIVYSGSTYYAASVKGRFTISRDNSRNTLYLQMNSLRPEDTAIYYCSAHGGESDVWGQGTTVTVSSASGGGGSGGRASGGGGSEIVLTQSPGTLSLSPGERATLSCRASQSVGSTNLAWYQQKPGQAPRLLIYDASNRATGIPDRFSGGGSGTDFTLTISRLEPEDFAVYYCQQYGSSPPWTFGQGTKVEIK

SEQ ID NO: 1022 - DNA, 723 bp, synthetic construct
  misc_feature 1..723: note = source = /note="Description of Artificial Sequence: Synthetic polynucleotide"
  source 1..723: mol_type = other DNA
gaagtgcaattggtggagactggaggaggagtggtgcaacctggaggaagcctgagactgtcatgcgcggtgtcgggcttcgccctctccaaccacggaatgtcctgggtccgccgggcccctgggaaaggacttgaatgggtgtccggcatcgtgtactcgggttccacctactacgcggcctcagtgaagggccggtttactattagccgcgacaactccagaaacacactgtacctccaaatgaactcgctgcggccggaagataccgctatctactactgctccgcccatgggggagagtcggacgtctggggacagggcaccactgtcactgtgtccagcgcttccggcggtggtggaagcgggggacgggcctcaggaggcggtggcagcgagattgtgctgacccagtcccccgggaccctgagcctgtccccgggagaaagggccaccctctcctgtcgggcatcccagtccgtggggtctactaaccttgcatggtaccagcagaagcccggccaggcccctcgcctgctgatctacgacgcgtccaatagagccaccggcatcccggatcgcttcagcggaggcggatcgggcaccgacttcaccctcaccatttcaaggctggaaccggaggacttcgccgtgtactactgccagcagtatggttcgtccccaccctggacgttcggccaggggactaaggtcgagatcaag

SEQ ID NO: 1023 - protein, 115 aa, synthetic construct
  REGION 1..115: note = source = /note="Description of Artificial Sequence: Synthetic polypeptide"
EVQLVETGGGVVQPGGSLRLSCAVSGFALSNHGMSWVRRAPGKGLEWVSGIVYSGSTYYAASVKGRFTISRDNSRNTLYLQMNSLRPEDTAIYYCSAHGGESDVWGQGTTVTVSS

SEQ ID NO: 1024 - protein, 109 aa, synthetic construct
  REGION 1..109: note = source = /note="Description of Artificial Sequence: Synthetic polypeptide"
EIVLTQSPGTLSLSPGERATLSCRASQSVGSTNLAWYQQKPGQAPRLLIYDASNRATGIPDRFSGGGSGTDFTLTISRLEPEDFAVYYCQQYGSSPPWTFGQGTKVEIK

SEQ ID NO: 1025 - protein, 485 aa, synthetic construct
  REGION 1..485: note = source = /note="Description of Artificial Sequence: Synthetic polypeptide"
MALPVTALLLPLALLLHAARPEVQLVETGGGVVQPGGSLRLSCAVSGFALSNHGMSWVRRAPGKGLEWVSGIVYSGSTYYAASVKGRFTISRDNSRNTLYLQMNSLRPEDTAIYYCSAHGGESDVWGQGTTVTVSSASGGGGSGGRASGGGGSEIVLTQSPGTLSLSPGERATLSCRASQSVGSTNLAWYQQKPGQAPRLLIYDASNRATGIPDRFSGGGSGTDFTLTISRLEPEDFAVYYCQQYGSSPPWTFGQGTKVEIKTTTPAPRPPTPAPTIASQPLSLRPEACRPAAGGAVHTRGLDFACDIYIWAPLAGTCGVLLLSLVITLYCKRGRKKLLYIFKQPFMRPVQTTQEEDGCSCRFPEEEEGGCELRVKFSRSADAPAYKQGQNQLYNELNLGRREEYDVLDKRRGRDPEMGGKPRRKNPQEGLYNELQKDKMAEAYSEIGMKGERRRGKGHDGLYQGLSTATKDTYDALHMQALPPR

SEQ ID NO: 1026 - DNA, 1455 bp, synthetic construct
  misc_feature 1..1455: note = source = /note="Description of Artificial Sequence: Synthetic polynucleotide"
  source 1..1455: mol_type = other DNA
atggccctccctgtcaccgccctgctgcttccgctggctcttctgctccacgccgctcggcccgaagtgcaattggtggagactggaggaggagtggtgcaacctggaggaagcctgagactgtcatgcgcggtgtcgggcttcgccctctccaaccacggaatgtcctgggtccgccgggcccctgggaaaggacttgaatgggtgtccggcatcgtgtactcgggttccacctactacgcggcctcagtgaagggccggtttactattagccgcgacaactccagaaacacactgtacctccaaatgaactcgctgcggccggaagataccgctatctactactgctccgcccatgggggagagtcggacgtctggggacagggcaccactgtcactgtgtccagcgcttccggcggtggtggaagcgggggacgggcctcaggaggcggtggcagcgagattgtgctgacccagtcccccgggaccctgagcctgtccccgggagaaagggccaccctctcctgtcgggcatcccagtccgtggggtctactaaccttgcatggtaccagcagaagcccggccaggcccctcgcctgctgatctacgacgcgtccaatagagccaccggcatcccggatcgcttcagcggaggcggatcgggcaccgacttcaccctcaccatttcaaggctggaaccggaggacttcgccgtgtactactgccagcagtatggttcgtccccaccctggacgttcggccaggggactaaggtcgagatcaagaccactaccccagcaccgaggccacccaccccggctcctaccatcgcctcccagcctctgtccctgcgtccggaggcatgtagacccgcagctggtggggccgtgcatacccggggtcttgacttcgcctgcgatatctacatttgggcccctctggctggtacttgcggggtcctgctgctttcactcgtgatcactctttactgtaagcgcggtcggaagaagctgctgtacatctttaagcaacccttcatgaggcctgtgcagactactcaagaggaggacggctgttcatgccggttcccagaggaggaggaaggcggctgcgaactgcgcgtgaaattcagccgcagcgcagatgctccagcctacaagcaggggcagaaccagctctacaacgaactcaatcttggtcggagagaggagtacgacgtgctggacaagcggagaggacgggacccagaaatgggcgggaagccgcgcagaaagaatccccaagagggcctgtacaacgagctccaaaaggataagatggcagaagcctatagcgagattggtatgaaaggggaacgcagaagaggcaaaggccacgacggactgtaccagggactcagcaccgccaccaaggacacctatgacgctcttcacatgcaggccctgccgcctcgg

SEQ ID NO: 1027 - protein, 239 aa, synthetic construct
  REGION 1..239: note = source = /note="Description of Artificial Sequence: Synthetic polypeptide"
QVQLVESGGGLVKPGGSLRLSCAASGFTFSDYYMSWIRQAPGKGLEWVSYISSSGSTIYYADSVKGRFTISRDNAKNSLYLQMNSLRAEDTAVYYCARESGDGMDVWGQGTTVTVSSASGGGGSGGRASGGGGSDIQMTQSPSSLSASVGDRVTITCRASQSISSYLNWYQQKPGKAPKLLIYAASSLQSGVPSRFSGSGSGTDFTLTISSLQPEDFATYYCQQSYTLAFGQGTKVDIK

SEQ ID NO: 1028 - DNA, 717 bp, synthetic construct
  misc_feature 1..717: note = source = /note="Description of Artificial Sequence: Synthetic polynucleotide"
  source 1..717: mol_type = other DNA
caagtgcaactcgtggaatctggtggaggactcgtgaaacctggaggatcattgagactgtcatgcgcggcctcgggattcacgttctccgattactacatgagctggattcgccaggctccggggaagggactggaatgggtgtcctacatttcctcatccggctccaccatctactacgcggactccgtgaaggggagattcaccattagccgcgataacgccaagaacagcctgtaccttcagatgaactccctgcgggctgaagatactgccgtctactactgcgcaagggagagcggagatgggatggacgtctggggacagggtaccactgtgaccgtgtcgtcggcctccggcggagggggttcgggtggaagggccagcggcggcggaggcagcgacatccagatgacccagtccccctcatcgctgtccgcctccgtgggcgaccgcgtcaccatcacatgccgggcctcacagtcgatctcctcctacctcaattggtatcagcagaagcccggaaaggcccctaagcttctgatctacgcagcgtcctccctgcaatccggggtcccatctcggttctccggctcgggcagcggtaccgacttcactctgaccatctcgagcctgcagccggaggacttcgccacttactactgtcagcaaagctacaccctcgcgtttggccagggcaccaaagtggacatcaag

SEQ ID NO: 1029 - protein, 117 aa, synthetic construct
  REGION 1..117: note = source = /note="Description of Artificial Sequence: Synthetic polypeptide"
QVQLVESGGGLVKPGGSLRLSCAASGFTFSDYYMSWIRQAPGKGLEWVSYISSSGSTIYYADSVKGRFTISRDNAKNSLYLQMNSLRAEDTAVYYCARESGDGMDVWGQGTTVTVSS

SEQ ID NO: 1030 - protein, 105 aa, synthetic construct
  REGION 1..105: note = source = /note="Description of Artificial Sequence: Synthetic polypeptide"
DIQMTQSPSSLSASVGDRVTITCRASQSISSYLNWYQQKPGKAPKLLIYAASSLQSGVPSRFSGSGSGTDFTLTISSLQPEDFATYYCQQSYTLAFGQGTKVDIK

SEQ ID NO: 1031 - protein, 483 aa, synthetic construct
  REGION 1..483: note = source = /note="Description of Artificial Sequence: Synthetic polypeptide"
MALPVTALLLPLALLLHAARPQVQLVESGGGLVKPGGSLRLSCAASGFTFSDYYMSWIRQAPGKGLEWVSYISSSGSTIYYADSVKGRFTISRDNAKNSLYLQMNSLRAEDTAVYYCARESGDGMDVWGQGTTVTVSSASGGGGSGGRASGGGGSDIQMTQSPSSLSASVGDRVTITCRASQSISSYLNWYQQKPGKAPKLLIYAASSLQSGVPSRFSGSGSGTDFTLTISSLQPEDFATYYCQQSYTLAFGQGTKVDIKTTTPAPRPPTPAPTIASQPLSLRPEACRPAAGGAVHTRGLDFACDIYIWAPLAGTCGVLLLSLVITLYCKRGRKKLLYIFKQPFMRPVQTTQEEDGCSCRFPEEEEGGCELRVKFSRSADAPAYKQGQNQLYNELNLGRREEYDVLDKRRGRDPEMGGKPRRKNPQEGLYNELQKDKMAEAYSEIGMKGERRRGKGHDGLYQGLSTATKDTYDALHMQALPPR

SEQ ID NO: 1032 - DNA, 1449 bp, synthetic construct
  misc_feature 1..1449: note = source = /note="Description of Artificial Sequence: Synthetic polynucleotide"
  source 1..1449: mol_type = other DNA
atggccctccctgtcaccgccctgctgcttccgctggctcttctgctccacgccgctcggccccaagtgcaactcgtggaatctggtggaggactcgtgaaacctggaggatcattgagactgtcatgcgcggcctcgggattcacgttctccgattactacatgagctggattcgccaggctccggggaagggactggaatgggtgtcctacatttcctcatccggctccaccatctactacgcggactccgtgaaggggagattcaccattagccgcgataacgccaagaacagcctgtaccttcagatgaactccctgcgggctgaagatactgccgtctactactgcgcaagggagagcggagatgggatggacgtctggggacagggtaccactgtgaccgtgtcgtcggcctccggcggagggggttcgggtggaagggccagcggcggcggaggcagcgacatccagatgacccagtccccctcatcgctgtccgcctccgtgggcgaccgcgtcaccatcacatgccgggcctcacagtcgatctcctcctacctcaattggtatcagcagaagcccggaaaggcccctaagcttctgatctacgcagcgtcctccctgcaatccggggtcccatctcggttctccggctcgggcagcggtaccgacttcactctgaccatctcgagcctgcagccggaggacttcgccacttactactgtcagcaaagctacaccctcgcgtttggccagggcaccaaagtggacatcaagaccactaccccagcaccgaggccacccaccccggctcctaccatcgcctcccagcctctgtccctgcgtccggaggcatgtagacccgcagctggtggggccgtgcatacccggggtcttgacttcgcctgcgatatctacatttgggcccctctggctggtacttgcggggtcctgctgctttcactcgtgatcactctttactgtaagcgcggtcggaagaagctgctgtacatctttaagcaacccttcatgaggcctgtgcagactactcaagaggaggacggctgttcatgccggttcccagaggaggaggaaggcggctgcgaactgcgcgtgaaattcagccgcagcgcagatgctccagcctacaagcaggggcagaaccagctctacaacgaactcaatcttggtcggagagaggagtacgacgtgctggacaagcggagaggacgggacccagaaatgggcgggaagccgcgcagaaagaatccccaagagggcctgtacaacgagctccaaaaggataagatggcagaagcctatagcgagattggtatgaaaggggaacgcagaagaggcaaaggccacgacggactgtaccagggactcagcaccgccaccaaggacacctatgacgctcttcacatgcaggccctgccgcctcgg

SEQ ID NO: 1033 - protein, 246 aa, synthetic construct
  REGION 1..246: note = source = /note="Description of Artificial Sequence: Synthetic polypeptide"
QVQLVQSGGGLVKPGGSLRLSCAASGFTFSDYYMSWIRQAPGKGLEWVSYISSSGNTIYYADSVKGRFTISRDNAKNSLYLQMNSLRAEDTAVYYCARSTMVREDYWGQGTLVTVSSASGGGGSGGRASGGGGSDIVLTQSPLSLPVTLGQPASISCKSSESLVHNSGKTYLNWFHQRPGQSPRRLIYEVSNRDSGVPDRFTGSGSGTDFTLKISRVEAEDVGVYYCMQGTHWPGTFGQGTKLEIK

SEQ ID NO: 1034 - DNA, 738 bp, synthetic construct
  misc_feature 1..738: note = source = /note="Description of Artificial Sequence: Synthetic polynucleotide"
  source 1..738: mol_type = other DNA
caagtgcaactggtgcaaagcggaggaggattggtcaaacccggaggaagcctgagactgtcatgcgcggcctctggattcaccttctccgattactacatgtcatggatcagacaggccccggggaagggcctcgaatgggtgtcctacatctcgtcctccgggaacaccatctactacgccgacagcgtgaagggccgctttaccatttcccgcgacaacgcaaagaactcgctgtaccttcagatgaattccctgcgggctgaagataccgcggtgtactattgcgcccggtccactatggtccgggaggactactggggacagggcacactcgtgaccgtgtccagcgcgagcgggggtggaggcagcggtggacgcgcctccggcggcggcggttcagacatcgtgctgactcagtcgcccctgtcgctgccggtcaccctgggccaaccggcctcaattagctgcaagtcctcggagagcctggtgcacaactcaggaaagacttacctgaactggttccatcagcggcctggacagtccccacggaggctcatctatgaagtgtccaacagggattcgggggtgcccgaccgcttcactggctccgggtccggcaccgacttcaccttgaaaatctccagagtggaagccgaggacgtgggcgtgtactactgtatgcagggtacccactggcctggaacctttggacaaggaactaagctcgagattaag

SEQ ID NO: 1035 - protein, 117 aa, synthetic construct
  REGION 1..117: note = source = /note="Description of Artificial Sequence: Synthetic polypeptide"
QVQLVQSGGGLVKPGGSLRLSCAASGFTFSDYYMSWIRQAPGKGLEWVSYISSSGNTIYYADSVKGRFTISRDNAKNSLYLQMNSLRAEDTAVYYCARSTMVREDYWGQGTLVTVSS

SEQ ID NO: 1036 - protein, 112 aa, synthetic construct
  REGION 1..112: note = source = /note="Description of Artificial Sequence: Synthetic polypeptide"
DIVLTQSPLSLPVTLGQPASISCKSSESLVHNSGKTYLNWFHQRPGQSPRRLIYEVSNRDSGVPDRFTGSGSGTDFTLKISRVEAEDVGVYYCMQGTHWPGTFGQGTKLEIK

SEQ ID NO: 1037 - protein, 490 aa, synthetic construct
  REGION 1..490: note = source = /note="Description of Artificial Sequence: Synthetic polypeptide"
MALPVTALLLPLALLLHAARPQVQLVQSGGGLVKPGGSLRLSCAASGFTFSDYYMSWIRQAPGKGLEWVSYISSSGNTIYYADSVKGRFTISRDNAKNSLYLQMNSLRAEDTAVYYCARSTMVREDYWGQGTLVTVSSASGGGGSGGRASGGGGSDIVLTQSPLSLPVTLGQPASISCKSSESLVHNSGKTYLNWFHQRPGQSPRRLIYEVSNRDSGVPDRFTGSGSGTDFTLKISRVEAEDVGVYYCMQGTHWPGTFGQGTKLEIKTTTPAPRPPTPAPTIASQPLSLRPEACRPAAGGAVHTRGLDFACDIYIWAPLAGTCGVLLLSLVITLYCKRGRKKLLYIFKQPFMRPVQTTQEEDGCSCRFPEEEEGGCELRVKFSRSADAPAYKQGQNQLYNELNLGRREEYDVLDKRRGRDPEMGGKPRRKNPQEGLYNELQKDKMAEAYSEIGMKGERRRGKGHDGLYQGLSTATKDTYDALHMQALPPR

SEQ ID NO: 1038 - DNA, 1470 bp, synthetic construct
  misc_feature 1..1470: note = source = /note="Description of Artificial Sequence: Synthetic polynucleotide"
  source 1..1470: mol_type = other DNA
atggccctccctgtcaccgccctgctgcttccgctggctcttctgctccacgccgctcggccccaagtgcaactggtgcaaagcggaggaggattggtcaaacccggaggaagcctgagactgtcatgcgcggcctctggattcaccttctccgattactacatgtcatggatcagacaggccccggggaagggcctcgaatgggtgtcctacatctcgtcctccgggaacaccatctactacgccgacagcgtgaagggccgctttaccatttcccgcgacaacgcaaagaactcgctgtaccttcagatgaattccctgcgggctgaagataccgcggtgtactattgcgcccggtccactatggtccgggaggactactggggacagggcacactcgtgaccgtgtccagcgcgagcgggggtggaggcagcggtggacgcgcctccggcggcggcggttcagacatcgtgctgactcagtcgcccctgtcgctgccggtcaccctgggccaaccggcctcaattagctgcaagtcctcggagagcctggtgcacaactcaggaaagacttacctgaactggttccatcagcggcctggacagtccccacggaggctcatctatgaagtgtccaacagggattcgggggtgcccgaccgcttcactggctccgggtccggcaccgacttcaccttgaaaatctccagagtggaagccgaggacgtgggcgtgtactactgtatgcagggtacccactggcctggaacctttggacaaggaactaagctcgagattaagaccactaccccagcaccgaggccacccaccccggctcctaccatcgcctcccagcctctgtccctgcgtccggaggcatgtagacccgcagctggtggggccgtgcatacccggggtcttgacttcgcctgcgatatctacatttgggcccctctggctggtacttgcggggtcctgctgctttcactcgtgatcactctttactgtaagcgcggtcggaagaagctgctgtacatctttaagcaacccttcatgaggcctgtgcagactactcaagaggaggacggctgttcatgccggttcccagaggaggaggaaggcggctgcgaactgcgcgtgaaattcagccgcagcgcagatgctccagcctacaagcaggggcagaaccagctctacaacgaactcaatcttggtcggagagaggagtacgacgtgctggacaagcggagaggacgggacccagaaatgggcgggaagccgcgcagaaagaatccccaagagggcctgtacaacgagctccaaaaggataagatggcagaagcctatagcgagattggtatgaaaggggaacgcagaagaggcaaaggccacgacggactgtaccagggactcagcaccgccaccaaggacacctatgacgctcttcacatgcaggccctgccgcctcgg

SEQ ID NO: 1039 - protein, 239 aa, synthetic construct
  REGION 1..239: note = source = /note="Description of Artificial Sequence: Synthetic polypeptide"
QVQLVESGGGLVQPGGSLRLSCAVSGFALSNHGMSWVRRAPGKGLEWVSGIVYSGSTYYAASVKGRFTISRDNSRNTLYLQMNSLRPEDTAIYYCSAHGGESDVWGQGTTVTVSSASGGGGSGGRASGGGGSDIRLTQSPSPLSASVGDRVTITCQASEDINKFLNWYHQTPGKAPKLLIYDASTLQTGVPSRFSGSGSGTDFTLTINSLQPEDIGTYYCQQYESLPLTFGGGTKVEIK

SEQ ID NO: 1040 - DNA, 717 bp, synthetic construct
  misc_feature 1..717: note = source = /note="Description of Artificial Sequence: Synthetic polynucleotide"
  source 1..717: mol_type = other DNA
caagtgcaactcgtggaatctggtggaggactcgtgcaacccggtggaagccttaggctgtcgtgcgccgtcagcgggtttgctctgagcaaccatggaatgtcctgggtccgccgggcaccgggaaaagggctggaatgggtgtccggcatcgtgtacagcgggtcaacctattacgccgcgtccgtgaagggcagattcactatctcaagagacaacagccggaacaccctgtacttgcaaatgaattccctgcgccccgaggacaccgccatctactactgctccgcccacggaggagagtcggacgtgtggggccagggaacgactgtgactgtgtccagcgcatcaggagggggtggttcgggcggccgggcctcggggggaggaggttccgacattcggctgacccagtccccgtccccactgtcggcctccgtcggcgaccgcgtgaccatcacttgtcaggcgtccgaggacattaacaagttcctgaactggtaccaccagacccctggaaaggcccccaagctgctgatctacgatgcctcgacccttcaaactggagtgcctagccggttctccgggtccggctccggcactgatttcactctgaccatcaactcattgcagccggaagatatcgggacctactattgccagcagtacgaatccctcccgctcacattcggcgggggaaccaaggtcgagattaag

SEQ ID NO: 1041 - protein, 115 aa, synthetic construct
  REGION 1..115: note = source = /note="Description of Artificial Sequence: Synthetic polypeptide"
QVQLVESGGGLVQPGGSLRLSCAVSGFALSNHGMSWVRRAPGKGLEWVSGIVYSGSTYYAASVKGRFTISRDNSRNTLYLQMNSLRPEDTAIYYCSAHGGESDVWGQGTTVTVSS

SEQ ID NO: 1042 - protein, 107 aa, synthetic construct
  REGION 1..107: note = source = /note="Description of Artificial Sequence: Synthetic polypeptide"
DIRLTQSPSPLSASVGDRVTITCQASEDINKFLNWYHQTPGKAPKLLIYDASTLQTGVPSRFSGSGSGTDFTLTINSLQPEDIGTYYCQQYESLPLTFGGGTKVEIK

SEQ ID NO: 1043 - protein, 483 aa, synthetic construct
  REGION 1..483: note = source = /note="Description of Artificial Sequence: Synthetic polypeptide"
MALPVTALLLPLALLLHAARPQVQLVESGGGLVQPGGSLRLSCAVSGFALSNHGMSWVRRAPGKGLEWVSGIVYSGSTYYAASVKGRFTISRDNSRNTLYLQMNSLRPEDTAIYYCSAHGGESDVWGQGTTVTVSSASGGGGSGGRASGGGGSDIRLTQSPSPLSASVGDRVTITCQASEDINKFLNWYHQTPGKAPKLLIYDASTLQTGVPSRFSGSGSGTDFTLTINSLQPEDIGTYYCQQYESLPLTFGGGTKVEIKTTTPAPRPPTPAPTIASQPLSLRPEACRPAAGGAVHTRGLDFACDIYIWAPLAGTCGVLLLSLVITLYCKRGRKKLLYIFKQPFMRPVQTTQEEDGCSCRFPEEEEGGCELRVKFSRSADAPAYKQGQNQLYNELNLGRREEYDVLDKRRGRDPEMGGKPRRKNPQEGLYNELQKDKMAEAYSEIGMKGERRRGKGHDGLYQGLSTATKDTYDALHMQALPPR

SEQ ID NO: 1044 - DNA, 1449 bp, synthetic construct
  misc_feature 1..1449: note = source = /note="Description of Artificial Sequence: Synthetic polynucleotide"
  source 1..1449: mol_type = other DNA
atggccctccctgtcaccgccctgctgcttccgctggctcttctgctccacgccgctcggccccaagtgcaactcgtggaatctggtggaggactcgtgcaacccggtggaagccttaggctgtcgtgcgccgtcagcgggtttgctctgagcaaccatggaatgtcctgggtccgccgggcaccgggaaaagggctggaatgggtgtccggcatcgtgtacagcgggtcaacctattacgccgcgtccgtgaagggcagattcactatctcaagagacaacagccggaacaccctgtacttgcaaatgaattccctgcgccccgaggacaccgccatctactactgctccgcccacggaggagagtcggacgtgtggggccagggaacgactgtgactgtgtccagcgcatcaggagggggtggttcgggcggccgggcctcggggggaggaggttccgacattcggctgacccagtccccgtccccactgtcggcctccgtcggcgaccgcgtgaccatcacttgtcaggcgtccgaggacattaacaagttcctgaactggtaccaccagacccctggaaaggcccccaagctgctgatctacgatgcctcgacccttcaaactggagtgcctagccggttctccgggtccggctccggcactgatttcactctgaccatcaactcattgcagccggaagatatcgggacctactattgccagcagtacgaatccctcccgctcacattcggcgggggaaccaaggtcgagattaagaccactaccccagcaccgaggccacccaccccggctcctaccatcgcctcccagcctctgtccctgcgtccggaggcatgtagacccgcagctggtggggccgtgcatacccggggtcttgacttcgcctgcgatatctacatttgggcccctctggctggtacttgcggggtcctgctgctttcactcgtgatcactctttactgtaagcgcggtcggaagaagctgctgtacatctttaagcaacccttcatgaggcctgtgcagactactcaagaggaggacggctgttcatgccggttcccagaggaggaggaaggcggctgcgaactgcgcgtgaaattcagccgcagcgcagatgctccagcctacaagcaggggcagaaccagctctacaacgaactcaatcttggtcggagagaggagtacgacgtgctggacaagcggagaggacgggacccagaaatgggcgggaagccgcgcagaaagaatccccaagagggcctgtacaacgagctccaaaaggataagatggcagaagcctatagcgagattggtatgaaaggggaacgcagaagaggcaaaggccacgacggactgtaccagggactcagcaccgccaccaaggacacctatgacgctcttcacatgcaggccctgccgcctcgg

SEQ ID NO: 1045 - protein, 240 aa, synthetic construct
  REGION 1..240: note = source = /note="Description of Artificial Sequence: Synthetic polypeptide"
EVQLVETGGGLVQPGGSLRLSCAVSGFALSNHGMSWVRRAPGKGLEWVSGIVYSGSTYYAASVKGRFTISRDNSRNTLYLQMNSLRPEDTAIYYCSAHGGESDVWGQGTTVTVSSASGGGGSGGRASGGGGSETTLTQSPATLSVSPGERATLSCRASQSVGSNLAWYQQKPGQGPRLLIYGASTRATGIPARFSGSGSGTEFTLTISSLQPEDFAVYYCQQYNDWLPVTFGQGTKVEIK

SEQ ID NO: 1046 - DNA, 720 bp, synthetic construct
  misc_feature 1..720: note = source = /note="Description of Artificial Sequence: Synthetic polynucleotide"
  source 1..720: mol_type = other DNA
gaagtgcaattggtggaaactggaggaggacttgtgcaacctggaggatcattgcggctctcatgcgctgtctccggcttcgccctgtcaaatcacgggatgtcgtgggtcagacgggccccgggaaagggtctggaatgggtgtcggggattgtgtacagcggctccacctactacgccgcttcggtcaagggccgcttcactatttcacgggacaacagccgcaacaccctctatctgcaaatgaactctctccgcccggaggataccgccatctactactgctccgcacacggcggcgaatccgacgtgtggggacagggaaccactgtcaccgtgtcgtccgcatccggtggcggaggatcgggtggccgggcctccgggggcggcggcagcgagactaccctgacccagtcccctgccactctgtccgtgagcccgggagagagagccacccttagctgccgggccagccagagcgtgggctccaacctggcctggtaccagcagaagccaggacagggtcccaggctgctgatctacggagcctccactcgcgcgaccggcatccccgcgaggttctccgggtcgggttccgggaccgagttcaccctgaccatctcctccctccaaccggaggacttcgcggtgtactactgtcagcagtacaacgattggctgcccgtgacatttggacaggggacgaaggtggaaatcaaa

SEQ ID NO: 1047 - protein, 115 aa, synthetic construct; identical to SEQ ID NO: 1017
  REGION 1..115: note = source = /note="Description of Artificial Sequence: Synthetic polypeptide"

SEQ ID NO: 1048 - protein, 108 aa, synthetic construct
  REGION 1..108: note = source = /note="Description of Artificial Sequence: Synthetic polypeptide"
ETTLTQSPATLSVSPGERATLSCRASQSVGSNLAWYQQKPGQGPRLLIYGASTRATGIPARFSGSGSGTEFTLTISSLQPEDFAVYYCQQYNDWLPVTFGQGTKVEIK

SEQ ID NO: 1049 - protein, 484 aa, synthetic construct
  REGION 1..484: note = source = /note="Description of Artificial Sequence: Synthetic polypeptide"
MALPVTALLLPLALLLHAARPEVQLVETGGGLVQPGGSLRLSCAVSGFALSNHGMSWVRRAPGKGLEWVSGIVYSGSTYYAASVKGRFTISRDNSRNTLYLQMNSLRPEDTAIYYCSAHGGESDVWGQGTTVTVSSASGGGGSGGRASGGGGSETTLTQSPATLSVSPGERATLSCRASQSVGSNLAWYQQKPGQGPRLLIYGASTRATGIPARFSGSGSGTEFTLTISSLQPEDFAVYYCQQYNDWLPVTFGQGTKVEIKTTTPAPRPPTPAPTIASQPLSLRPEACRPAAGGAVHTRGLDFACDIYIWAPLAGTCGVLLLSLVITLYCKRGRKKLLYIFKQPFMRPVQTTQEEDGCSCRFPEEEEGGCELRVKFSRSADAPAYKQGQNQLYNELNLGRREEYDVLDKRRGRDPEMGGKPRRKNPQEGLYNELQKDKMAEAYSEIGMKGERRRGKGHDGLYQGLSTATKDTYDALHMQALPPR

SEQ ID NO: 1050 - DNA, 1452 bp, synthetic construct
  misc_feature 1..1452: note = source = /note="Description of Artificial Sequence: Synthetic polynucleotide"
  source 1..1452: mol_type = other DNA
atggccctccctgtcaccgccctgctgcttccgctggctcttctgctccacgccgctcggcccgaagtgcaattggtggaaactggaggaggacttgtgcaacctggaggatcattgcggctctcatgcgctgtctccggcttcgccctgtcaaatcacgggatgtcgtgggtcagacgggccccgggaaagggtctggaatgggtgtcggggattgtgtacagcggctccacctactacgccgcttcggtcaagggccgcttcactatttcacgggacaacagccgcaacaccctctatctgcaaatgaactctctccgcccggaggataccgccatctactactgctccgcacacggcggcgaatccgacgtgtggggacagggaaccactgtcaccgtgtcgtccgcatccggtggcggaggatcgggtggccgggcctccgggggcggcggcagcgagactaccctgacccagtcccctgccactctgtccgtgagcccgggagagagagccacccttagctgccgggccagccagagcgtgggctccaacctggcctggtaccagcagaagccaggacagggtcccaggctgctgatctacggagcctccactcgcgcgaccggcatccccgcgaggttctccgggtcgggttccgggaccgagttcaccctgaccatctcctccctccaaccggaggacttcgcggtgtactactgtcagcagtacaacgattggctgcccgtgacatttggacaggggacgaaggtggaaatcaaaaccactaccccagcaccgaggccacccaccccggctcctaccatcgcctcccagcctctgtccctgcgtccggaggcatgtagacccgcagctggtggggccgtgcatacccggggtcttgacttcgcctgcgatatctacatttgggcccctctggctggtacttgcggggtcctgctgctttcactcgtgatcactctttactgtaagcgcggtcggaagaagctgctgtacatctttaagcaacccttcatgaggcctgtgcagactactcaagaggaggacggctgttcatgccggttcccagaggaggaggaaggcggctgcgaactgcgcgtgaaattcagccgcagcgcagatgctccagcctacaagcaggggcagaaccagctctacaacgaactcaatcttggtcggagagaggagtacgacgtgctggacaagcggagaggacgggacccagaaatgggcgggaagccgcgcagaaagaatccccaagagggcctgtacaacgagctccaaaaggataagatggcagaagcctatagcgagattggtatgaaaggggaacgcagaagaggcaaaggccacgacggactgtaccagggactcagcaccgccaccaaggacacctatgacgctcttcacatgcaggccctgccgcctcgg

SEQ ID NO: 1051 - protein, 241 aa, synthetic construct
  REGION 1..241: note = source = /note="Description of Artificial Sequence: Synthetic polypeptide"
EVQLVESGGGLVQPGGSLRLSCAVSGFALSNHGMSWVRRAPGKGLEWVSGIVYSGSTYYAASVKGRFTISRDNSRNTLYLQMNSLRPEDTAIYYCSAHGGESDVWGQGTTVTVSSASGGGGSGGRASGGGGSEIVLTQSPGTLSLSPGERATLSCRASQSIGSSSLAWYQQKPGQAPRLLMYGASSRASGIPDRFSGSGSGTDFTLTISRLEPEDFAVYYCQQYAGSPPFTFGQGTKVEIK

SEQ ID NO: 1052 - DNA, 723 bp, synthetic construct
  misc_feature 1..723: note = source = /note="Description of Artificial Sequence: Synthetic polynucleotide"
  source 1..723: mol_type = other DNA
gaagtgcaattggtggaatctggtggaggacttgtgcaacctggaggatcactgagactgtcatgcgcggtgtccggttttgccctgagcaatcatgggatgtcgtgggtccggcgcgcccccggaaagggtctggaatgggtgtcgggtatcgtctactccgggagcacttactacgccgcgagcgtgaagggccgcttcaccatttcccgcgataactcccgcaacaccctgtacttgcaaatgaactcgctccggcctgaggacactgccatctactactgctccgcacacggaggagaatccgacgtgtggggccagggaactaccgtgaccgtcagcagcgcctccggcggcgggggctcaggcggacgggctagcggcggcggtggctccgagatcgtgctgacccagtcgcctggcactctctcgctgagccccggggaaagggcaaccctgtcctgtcgggccagccagtccattggatcatcctccctcgcctggtatcagcagaaaccgggacaggctccgcggctgcttatgtatggggccagctcaagagcctccggcattcccgaccggttctccgggtccggttccggcaccgatttcaccctgactatctcgaggctggagccagaggacttcgccgtgtactactgccagcagtacgcggggtccccgccgttcacgttcggacagggaaccaaggtcgagatcaag

SEQ ID NO: 1053 - protein, 115 aa, synthetic construct; identical to SEQ ID NO: 969
  REGION 1..115: note = source = /note="Description of Artificial Sequence: Synthetic polypeptide"

SEQ ID NO: 1054 - protein, 109 aa, synthetic construct
  REGION 1..109: note = source = /note="Description of Artificial Sequence: Synthetic polypeptide"
EIVLTQSPGTLSLSPGERATLSCRASQSIGSSSLAWYQQKPGQAPRLLMYGASSRASGIPDRFSGSGSGTDFTLTISRLEPEDFAVYYCQQYAGSPPFTFGQGTKVEIK

SEQ ID NO: 1055 - protein, 485 aa, synthetic construct
  REGION 1..485: note = source = /note="Description of Artificial Sequence: Synthetic polypeptide"
MALPVTALLLPLALLLHAARPEVQLVESGGGLVQPGGSLRLSCAVSGFALSNHGMSWVRRAPGKGLEWVSGIVYSGSTYYAASVKGRFTISRDNSRNTLYLQMNSLRPEDTAIYYCSAHGGESDVWGQGTTVTVSSASGGGGSGGRASGGGGSEIVLTQSPGTLSLSPGERATLSCRASQSIGSSSLAWYQQKPGQAPRLLMYGASSRASGIPDRFSGSGSGTDFTLTISRLEPEDFAVYYCQQYAGSPPFTFGQGTKVEIKTTTPAPRPPTPAPTIASQPLSLRPEACRPAAGGAVHTRGLDFACDIYIWAPLAGTCGVLLLSLVITLYCKRGRKKLLYIFKQPFMRPVQTTQEEDGCSCRFPEEEEGGCELRVKFSRSADAPAYKQGQNQLYNELNLGRREEYDVLDKRRGRDPEMGGKPRRKNPQEGLYNELQKDKMAEAYSEIGMKGERRRGKGHDGLYQGLSTATKDTYDALHMQALPPR

SEQ ID NO: 1056 - DNA, 1455 bp, synthetic construct
  misc_feature 1..1455: note = source = /note="Description of Artificial Sequence: Synthetic polynucleotide"
  source 1..1455: mol_type = other DNA
atggccctccctgtcaccgccctgctgcttccgctggctcttctgctccacgccgctcggcccgaagtgcaattggtggaatctggtggaggacttgtgcaacctggaggatcactgagactgtcatgcgcggtgtccggttttgccctgagcaatcatgggatgtcgtgggtccggcgcgcccccggaaagggtctggaatgggtgtcgggtatcgtctactccgggagcacttactacgccgcgagcgtgaagggccgcttcaccatttcccgcgataactcccgcaacaccctgtacttgcaaatgaactcgctccggcctgaggacactgccatctactactgctccgcacacggaggagaatccgacgtgtggggccagggaactaccgtgaccgtcagcagcgcctccggcggcgggggctcaggcggacgggctagcggcggcggtggctccgagatcgtgctgacccagtcgcctggcactctctcgctgagccccggggaaagggcaaccctgtcctgtcgggccagccagtccattggatcatcctccctcgcctggtatcagcagaaaccgggacaggctccgcggctgcttatgtatggggccagctcaagagcctccggcattcccgaccggttctccgggtccggttccggcaccgatttcaccctgactatctcgaggctggagccagaggacttcgccgtgtactactgccagcagtacgcggggtccccgccgttcacgttcggacagggaaccaaggtcgagatcaagaccactaccccagcaccgaggccacccaccccggctcctaccatcgcctcccagcctctgtccctgcgtccggaggcatgtagacccgcagctggtggggccgtgcatacccggggtcttgacttcgcctgcgatatctacatttgggcccctctggctggtacttgcggggtcctgctgctttcactcgtgatcactctttactgtaagcgcggtcggaagaagctgctgtacatctttaagcaacccttcatgaggcctgtgcagactactcaagaggaggacggctgttcatgccggttcccagaggaggaggaaggcggctgcgaactgcgcgtgaaattcagccgcagcgcagatgctccagcctacaagcaggggcagaaccagctctacaacgaactcaatcttggtcggagagaggagtacgacgtgctggacaagcggagaggacgggacccagaaatgggcgggaagccgcgcagaaagaatccccaagagggcctgtacaacgagctccaaaaggataagatggcagaagcctatagcgagattggtatgaaaggggaacgcagaagaggcaaaggccacgacggactgtaccagggactcagcaccgccaccaaggacacctatgacgctcttcacatgcaggccctgccgcctcgg

SEQ ID NO: 1057 - protein, 243 aa, synthetic construct
  REGION 1..243: note = source = /note="Description of Artificial Sequence: Synthetic polypeptide"
QVQLQESGPGLVKPSETLSLTCTVSGGSISSSYYYWGWIRQPPGKGLEWIGSIYYSGSAYYNPSLKSRVTISVDTSKNQFSLRLSSVTAADTAVYYCARHWQEWPDAFDIWGQGTMVTVSSGGGGSGGGGSGGGGSETTLTQSPAFMSATPGDKVIISCKASQDIDDAMNWYQQKPGEAPLFIIQSATSPVPGIPPRFSGSGFGTDFSLTINNIESEDAAYYFCLQHDNFPLTFGQGTKLEIK

SEQ ID NO: 1058 - DNA, 729 bp, synthetic construct
  misc_feature 1..729: note = source = /note="Description of Artificial Sequence: Synthetic polynucleotide"
  source 1..729: mol_type = other DNA
caagtgcagcttcaggaaagcggaccgggcctggtcaagccatccgaaactctctccctgacttgcactgtgtctggcggttccatctcatcgtcgtactactactggggctggattaggcagccgcccggaaagggactggagtggatcggaagcatctactattccggctcggcgtactacaaccctagcctcaagtcgagagtgaccatctccgtggatacctccaagaaccagttttccctgcgcctgagctccgtgaccgccgctgacaccgccgtgtactactgtgctcggcattggcaggaatggcccgatgccttcgacatttggggccagggcactatggtcactgtgtcatccgggggtggaggcagcgggggaggagggtccggggggggaggttcagagacaaccttgacccagtcacccgcattcatgtccgccactccgggagacaaggtcatcatctcgtgcaaagcgtcccaggatatcgacgatgccatgaattggtaccagcagaagcctggcgaagcgccgctgttcattatccaatccgcaacctcgcccgtgcctggaatcccaccgcggttcagcggcagcggtttcggaaccgacttttccctgaccattaacaacattgagtccgaggacgccgcctactacttctgcctgcaacacgacaacttccctctcacgttcggccagggaaccaagctggaaatcaag

SEQ ID NO: 1059 - protein, 121 aa, synthetic construct
  REGION 1..121: note = source = /note="Description of Artificial Sequence: Synthetic polypeptide"
QVQLQESGPGLVKPSETLSLTCTVSGGSISSSYYYWGWIRQPPGKGLEWIGSIYYSGSAYYNPSLKSRVTISVDTSKNQFSLRLSSVTAADTAVYYCARHWQEWPDAFDIWGQGTMVTVSS

SEQ ID NO: 1060 - protein, 107 aa, synthetic construct
  REGION 1..107: note = source = /note="Description of Artificial Sequence: Synthetic polypeptide"
ETTLTQSPAFMSATPGDKVIISCKASQDIDDAMNWYQQKPGEAPLFIIQSATSPVPGIPPRFSGSGFGTDFSLTINNIESEDAAYYFCLQHDNFPLTFGQGTKLEIK

SEQ ID NO: 1061 - protein, 487 aa, synthetic construct
  REGION 1..487: note = source = /note="Description of Artificial Sequence: Synthetic polypeptide"
MALPVTALLLPLALLLHAARPQVQLQESGPGLVKPSETLSLTCTVSGGSISSSYYYWGWIRQPPGKGLEWIGSIYYSGSAYYNPSLKSRVTISVDTSKNQFSLRLSSVTAADTAVYYCARHWQEWPDAFDIWGQGTMVTVSSGGGGSGGGGSGGGGSETTLTQSPAFMSATPGDKVIISCKASQDIDDAMNWYQQKPGEAPLFIIQSATSPVPGIPPRFSGSGFGTDFSLTINNIESEDAAYYFCLQHDNFPLTFGQGTKLEIKTTTPAPRPPTPAPTIASQPLSLRPEACRPAAGGAVHTRGLDFACDIYIWAPLAGTCGVLLLSLVITLYCKRGRKKLLYIFKQPFMRPVQTTQEEDGCSCRFPEEEEGGCELRVKFSRSADAPAYKQGQNQLYNELNLGRREEYDVLDKRRGRDPEMGGKPRRKNPQEGLYNELQKDKMAEAYSEIGMKGERRRGKGHDGLYQGLSTATKDTYDALHMQALPPR

SEQ ID NO: 1062 - DNA, 1461 bp, synthetic construct
  misc_feature 1..1461: note = source = /note="Description of Artificial Sequence: Synthetic polynucleotide"
  source 1..1461: mol_type = other DNA
atggccctccctgtcaccgccctgctgcttccgctggctcttctgctccacgccgctcggccccaagtgcagcttcaggaaagcggaccgggcctggtcaagccatccgaaactctctccctgacttgcactgtgtctggcggttccatctcatcgtcgtactactactggggctggattaggcagccgcccggaaagggactggagtggatcggaagcatctactattccggctcggcgtactacaaccctagcctcaagtcgagagtgaccatctccgtggatacctccaagaaccagttttccctgcgcctgagctccgtgaccgccgctgacaccgccgtgtactactgtgctcggcattggcaggaatggcccgatgccttcgacatttggggccagggcactatggtcactgtgtcatccgggggtggaggcagcgggggaggagggtccggggggggaggttcagagacaaccttgacccagtcacccgcattcatgtccgccactccgggagacaaggtcatcatctcgtgcaaagcgtcccaggatatcgacgatgccatgaattggtaccagcagaagcctggcgaagcgccgctgttcattatccaatccgcaacctcgcccgtgcctggaatcccaccgcggttcagcggcagcggtttcggaaccgacttttccctgaccattaacaacattgagtccgaggacgccgcctactacttctgcctgcaacacgacaacttccctctcacgttcggccagggaaccaagctggaaatcaagaccactaccccagcaccgaggccacccaccccggctcctaccatcgcctcccagcctctgtccctgcgtccggaggcatgtagacccgcagctggtggggccgtgcatacccggggtcttgacttcgcctgcgatatctacatttgggcccctctggctggtacttgcggggtcctgctgctttcactcgtgatcactctttactgtaagcgcggtcggaagaagctgctgtacatctttaagcaacccttcatgaggcctgtgcagactactcaagaggaggacggctgttcatgccggttcccagaggaggaggaaggcggctgcgaactgcgcgtgaaattcagccgcagcgcagatgctccagcctacaagcaggggcagaaccagctctacaacgaactcaatcttggtcggagagaggagtacgacgtgctggacaagcggagaggacgggacccagaaatgggcgggaagccgcgcagaaagaatccccaagagggcctgtacaacgagctccaaaaggataagatggcagaagcctatagcgagattggtatgaaaggggaacgcagaagaggcaaaggccacgacggactgtaccagggactcagcaccgccaccaaggacacctatgacgctcttcacatgcaggccctgccgcctcgg

SEQ ID NO: 1063 - protein, 244 aa, synthetic construct
  REGION 1..244: note = source = /note="Description of Artificial Sequence: Synthetic polypeptide"
VNLRESGPALVKPTQTLTLTCTFSGFSLRTSGMCVSWIRQPPGKALEWLARIDWDEDKFYSTSLKTRLTISKDTSDNQVVLRMTNMDPADTATYYCARSGAGGTSATAFDIWGPGTMVTVSSGGGGSGGGGSGGGGSDIQMTQSPSSLSASVGDRVTITCRASQDIYNNLAWFQLKPGSAPRSLMYAANKSQSGVPSRFSGSASGTDFTLTISSLQPEDFATYYCQHYYRFPYSFGQGTKLEIK

SEQ ID NO: 1064 - DNA, 735 bp, synthetic construct
  misc_feature 1..735: note = source = /note="Description of Artificial Sequence: Synthetic polynucleotide"
  source 1..735: mol_type = other DNA
caagtcaatctgcgcgaatccggccccgccttggtcaagcctacccagaccctcactctgacctgtactttctccggcttctccctgcggacttccgggatgtgcgtgtcctggatcagacagcctccgggaaaggccctggagtggctcgctcgcattgactgggatgaggacaagttctactccacctcactcaagaccaggctgaccatcagcaaagatacctctgacaaccaagtggtgctccgcatgaccaacatggacccagccgacactgccacttactactgcgcgaggagcggagcgggcggaacctccgccaccgccttcgatatttggggcccgggtaccatggtcaccgtgtcaagcggaggaggggggtccgggggcggcggttccgggggaggcggatcggacattcagatgactcagtcaccatcgtccctgagcgctagcgtgggcgacagagtgacaatcacttgccgggcatcccaggacatctataacaaccttgcgtggttccagctgaagcctggttccgcaccgcggtcacttatgtacgccgccaacaagagccagtcgggagtgccgtcccggttttccggttcggcctcgggaactgacttcaccctgacgatctccagcctgcaacccgaggatttcgccacctactactgccagcactactaccgctttccctactcgttcggacagggaaccaagctggaaatcaag

SEQ ID NO: 1065 - protein, 123 aa, synthetic construct
  REGION 1..123: note = source = /note="Description of Artificial Sequence: Synthetic polypeptide"
QVNLRESGPALVKPTQTLTLTCTFSGFSLRTSGMCVSWIRQPPGKALEWLARIDWDEDKFYSTSLKTRLTISKDTSDNQVVLRMTNMDPADTATYYCARSGAGGTSATAFDIWGPGTMVTVSS

SEQ ID NO: 1066 - protein, 107 aa, synthetic construct
  REGION 1..107: note = source = /note="Description of Artificial Sequence: Synthetic polypeptide"
DIQMTQSPSSLSASVGDRVTITCRASQDIYNNLAWFQLKPGSAPRSLMYAANKSQSGVPSRFSGSASGTDFTLTISSLQPEDFATYYCQHYYRFPYSFGQGTKLEIK

SEQ ID NO: 1067 - protein, 489 aa, synthetic construct
  REGION 1..489: note = source = /note="Description of Artificial Sequence: Synthetic polypeptide"
MALPVTALLLPLALLLHAARPQVNLRESGPALVKPTQTLTLTCTFSGFSLRTSGMCVSWIRQPPGKALEWLARIDWDEDKFYSTSLKTRLTISKDTSDNQVVLRMTNMDPADTATYYCARSGAGGTSATAFDIWGPGTMVTVSSGGGGSGGGGSGGGGSDIQMTQSPSSLSASVGDRVTITCRASQDIYNNLAWFQLKPGSAPRSLMYAANKSQSGVPSRFSGSASGTDFTLTISSLQPEDFATYYCQHYYRFPYSFGQGTKLEIKTTTPAPRPPTPAPTIASQPLSLRPEACRPAAGGAVHTRGLDFACDIYIWAPLAGTCGVLLLSLVITLYCKRGRKKLLYIFKQPFMRPVQTTQEEDGCSCRFPEEEEGGCELRVKFSRSADAPAYKQGQNQLYNELNLGRREEYDVLDKRRGRDPEMGGKPRRKNPQEGLYNELQKDKMAEAYSEIGMKGERRRGKGHDGLYQGLSTATKDTYDALHMQALPPR

SEQ ID NO: 1068 - DNA, 1467 bp, synthetic construct
  misc_feature 1..1467: note = source = /note="Description of Artificial Sequence: Synthetic polynucleotide"
  source 1..1467: mol_type = other DNA
atggccctccctgtcaccgccctgctgcttccgctggctcttctgctccacgccgctcggccccaagtcaatctgcgcgaatccggccccgccttggtcaagcctacccagaccctcactctgacctgtactttctccggcttctccctgcggacttccgggatgtgcgtgtcctggatcagacagcctccgggaaaggccctggagtggctcgctcgcattgactgggatgaggacaagttctactccacctcactcaagaccaggctgaccatcagcaaagatacctctgacaaccaagtggtgctccgcatgaccaacatggacccagccgacactgccacttactactgcgcgaggagcggagcgggcggaacctccgccaccgccttcgatatttggggcccgggtaccatggtcaccgtgtcaagcggaggaggggggtccgggggcggcggttccgggggaggcggatcggacattcagatgactcagtcaccatcgtccctgagcgctagcgtgggcgacagagtgacaatcacttgccgggcatcccaggacatctataacaaccttgcgtggttccagctgaagcctggttccgcaccgcggtcacttatgtacgccgccaacaagagccagtcgggagtgccgtcccggttttccggttcggcctcgggaactgacttcaccctgacgatctccagcctgcaacccgaggatttcgccacctactactgccagcactactaccgctttccctactcgttcggacagggaaccaagctggaaatcaagaccactaccccagcaccgaggccacccaccccggctcctaccatcgcctcccagcctctgtccctgcgtccggaggcatgtagacccgcagctggtggggccgtgcatacccggggtcttgacttcgcctgcgatatctacatttgggcccctctggctggtacttgcggggtcctgctgctttcactcgtgatcactctttactgtaagcgcggtcggaagaagctgctgtacatctttaagcaacccttcatgaggcctgtgcagactactcaagaggaggacggctgttcatgccggttcccagaggaggaggaaggcggctgcgaactgcgcgtgaaattcagccgcagcgcagatgctccagcctacaagcaggggcagaaccagctctacaacgaactcaatcttggtcggagagaggagtacgacgtgctggacaagcggagaggacgggacccagaaatgggcgggaagccgcgcagaaagaatccccaagagggcctgtacaacgagctccaaaaggataagatggcagaagcctatagcgagattggtatgaaaggggaacgcagaagaggcaaaggccacgacggactgtaccagggactcagcaccgccaccaaggacacctatgacgctcttcacatgcaggccctgccgcctcgg

SEQ ID NO: 1069 - protein, 246 aa, synthetic construct
  REGION 1..246: note = source = /note="Description of Artificial Sequence: Synthetic polypeptide"
EVQLVESGGGLVKPGGSLRLSCAASGFTFSSYSMNWVRQAPGKGLEWVSSISSSSSYIYYADSVKGRFTISRDNAKNSLYLQMNSLRAEDTAVYYCAKTIAAVYAFDIWGQGTTVTVSSGGGGSGGGGSGGGGSEIVLTQSPLSLPVTPEEPASISCRSSQSLLHSNGYNYLDWYLQKPGQSPQLLIYLGSNRASGVPDRFSGSGSGTDFTLKISRVEAEDVGVYYCMQALQTPYTFGQGTKLEIK

SEQ ID NO: 1070 - DNA, 738 bp, synthetic construct
  misc_feature 1..738: note = source = /note="Description of Artificial Sequence: Synthetic polynucleotide"
  source 1..738: mol_type = other DNA
gaagtgcagcttgtcgaatccggggggggactggtcaagccgggcggatcactgagactgtcctgcgccgcgagcggcttcacgttctcctcctactccatgaactgggtccgccaagcccccgggaagggactggaatgggtgtcctctatctcctcgtcgtcgtcctacatctactacgccgactccgtgaagggaagattcaccatttcccgcgacaacgcaaagaactcactgtacttgcaaatgaactcactccgggccgaagatactgctgtgtactattgcgccaagactattgccgccgtctacgctttcgacatctggggccagggaaccaccgtgactgtgtcgtccggtggtggtggctcgggcggaggaggaagcggcggcggggggtccgagattgtgctgacccagtcgccactgagcctccctgtgacccccgaggaacccgccagcatcagctgccggtccagccagtccctgctccactccaacggatacaattacctcgattggtaccttcagaagcctggacaaagcccgcagctgctcatctacttgggatcaaaccgcgcgtcaggagtgcctgaccggttctccggctcgggcagcggtaccgatttcaccctgaaaatctccagggtggaggcagaggacgtgggagtgtattactgtatgcaggcgctgcagactccgtacacatttgggcagggcaccaagctggagatcaag

SEQ ID NO: 1071 - protein, 119 aa, synthetic construct
  REGION 1..119: note = source = /note="Description of Artificial Sequence: Synthetic polypeptide"
EVQLVESGGGLVKPGGSLRLSCAASGFTFSSYSMNWVRQAPGKGLEWVSSISSSSSYIYYADSVKGRFTISRDNAKNSLYLQMNSLRAEDTAVYYCAKTIAAVYAFDIWGQGTTVTVSS

SEQ ID NO: 1072 - protein, 112 aa, synthetic construct
  REGION 1..112: note = source = /note="Description of Artificial Sequence: Synthetic polypeptide"
EIVLTQSPLSLPVTPEEPASISCRSSQSLLHSNGYNYLDWYLQKPGQSPQLLIYLGSNRASGVPDRFSGSGSGTDFTLKISRVEAEDVGVYYCMQALQTPYTFGQGTKLEIK

SEQ ID NO: 1073 - protein, 490 aa, synthetic construct
  REGION 1..490: note = source = /note="Description of Artificial Sequence: Synthetic polypeptide"
MALPVTALLLPLALLLHAARPEVQLVESGGGLVKPGGSLRLSCAASGFTFSSYSMNWVRQAPGKGLEWVSSISSSSSYIYYADSVKGRFTISRDNAKNSLYLQMNSLRAEDTAVYYCAKTIAAVYAFDIWGQGTTVTVSSGGGGSGGGGSGGGGSEIVLTQSPLSLPVTPEEPASISCRSSQSLLHSNGYNYLDWYLQKPGQSPQLLIYLGSNRASGVPDRFSGSGSGTDFTLKISRVEAEDVGVYYCMQALQTPYTFGQGTKLEIKTTTPAPRPPTPAPTIASQPLSLRPEACRPAAGGAVHTRGLDFACDIYIWAPLAGTCGVLLLSLVITLYCKRGRKKLLYIFKQPFMRPVQTTQEEDGCSCRFPEEEEGGCELRVKFSRSADAPAYKQGQNQLYNELNLGRREEYDVLDKRRGRDPEMGGKPRRKNPQEGLYNELQKDKMAEAYSEIGMKGERRRGKGHDGLYQGLSTATKDTYDALHMQALPPR

SEQ ID NO: 1074 - DNA, 1470 bp, synthetic construct
  misc_feature 1..1470: note = source = /note="Description of Artificial Sequence: Synthetic polynucleotide"
  source 1..1470: mol_type = other DNA
atggccctccctgtcaccgccctgctgcttccgctggctcttctgctccacgccgctcggcccgaagtgcagcttgtcgaatccggggggggactggtcaagccgggcggatcactgagactgtcctgcgccgcgagcggcttcacgttctcctcctactccatgaactgggtccgccaagcccccgggaagggactggaatgggtgtcctctatctcctcgtcgtcgtcctacatctactacgccgactccgtgaagggaagattcaccatttcccgcgacaacgcaaagaactcactgtacttgcaaatgaactcactccgggccgaagatactgctgtgtactattgcgccaagactattgccgccgtctacgctttcgacatctggggccagggaaccaccgtgactgtgtcgtccggtggtggtggctcgggcggaggaggaagcggcggcggggggtccgagattgtgctgacccagtcgccactgagcctccctgtgacccccgaggaacccgccagcatcagctgccggtccagccagtccctgctccactccaacggatacaattacctcgattggtaccttcagaagcctggacaaagcccgcagctgctcatctacttgggatcaaaccgcgcgtcaggagtgcctgaccggttctccggctcgggcagcggtaccgatttcaccctgaaaatctccagggtggaggcagaggacgtgggagtgtattactgtatgcaggcgctgcagactccgtacacatttgggcagggcaccaagctggagatcaagaccactaccccagcaccgaggccacccaccccggctcctaccatcgcctcccagcctctgtccctgcgtccggaggcatgtagacccgcagctggtggggccgtgcatacccggggtcttgacttcgcctgcgatatctacatttgggcccctctggctggtacttgcggggtcctgctgctttcactcgtgatcactctttactgtaagcgcggtcggaagaagctgctgtacatctttaagcaacccttcatgaggcctgtgcagactactcaagaggaggacggctgttcatgccggttcccagaggaggaggaaggcggctgcgaactgcgcgtgaaattcagccgcagcgcagatgctccagcctacaagcaggggcagaaccagctctacaacgaactcaatcttggtcggagagaggagtacgacgtgctggacaagcggagaggacgggacccagaaatgggcgggaagccgcgcagaaagaatccccaagagggcctgtacaacgagctccaaaaggataagatggcagaagcctatagcgagattggtatgaaaggggaacgcagaagaggcaaaggccacgacggactgtaccagggactcagcaccgccaccaaggacacctatgacgctcttcacatgcaggccctgccgcctcgg

SEQ ID NO: 1075 - protein, 240 aa, synthetic construct
  REGION 1..240: note = source = /note="Description of Artificial Sequence: Synthetic polypeptide"
EVQLVESGGGLVKPGGSLRLSCAASGFTFSDYYMSWIRQAPGKGLEWVSYISSSGSTIYYADSVKGRFTISRDNAKNSLYLQMNSLRAEDTAVYYCARDLRGAFDIWGQGTMVTVSSGGGGSGGGGSGGGGSSYVLTQSPSVSAAPGYTATISCGGNNIGTKSVHWYQQKPGQAPLLVIRDDSVRPSKIPGRFSGSNSGNMATLTISGVQAGDEADFYCQVWDSDSEHVVFGGGTKLTVL

SEQ ID NO: 1076 - DNA, 720 bp, synthetic construct
  misc_feature 1..720: note = source = /note="Description of Artificial Sequence: Synthetic polynucleotide"
  source 1..720: mol_type = other DNA
gaagtccagctcgtggagtccggcggaggccttgtgaagcctggaggttcgctgagactgtcctgcgccgcctccggcttcaccttctccgactactacatgtcctggatcagacaggccccgggaaagggcctggaatgggtgtcctacatctcgtcatcgggcagcactatctactacgcggactcagtgaaggggcggttcaccatttcccgggataacgcgaagaactcgctgtatctgcaaatgaactcactgagggccgaggacaccgccgtgtactactgcgcccgcgatctccgcggggcatttgacatctggggacagggaaccatggtcacagtgtccagcggagggggaggatcgggtggcggaggttccgggggtggaggctcctcctacgtgctgactcagagcccaagcgtcagcgctgcgcccggttacacggcaaccatctcctgtggcggaaacaacattgggaccaagtctgtgcactggtatcagcagaagccgggccaagctcccctgttggtgatccgcgatgactccgtgcggcctagcaaaattccgggacggttctccggctccaacagcggcaatatggccactctcaccatctcgggagtgcaggccggagatgaagccgacttctactgccaagtctgggactcagactccgagcatgtggtgttcgggggcggaaccaagctgactgtgctc

SEQ ID NO: 1077 - protein, 117 aa, synthetic construct
  REGION 1..117: note = source = /note="Description of Artificial Sequence: Synthetic polypeptide"
EVQLVESGGGLVKPGGSLRLSCAASGFTFSDYYMSWIRQAPGKGLEWVSYISSSGSTIYYADSVKGRFTISRDNAKNSLYLQMNSLRAEDTAVYYCARDLRGAFDIWGQGTMVTVSS

SEQ ID NO: 1078 - protein, 108 aa, synthetic construct
  REGION 1..108: note = source = /note="Description of Artificial Sequence: Synthetic polypeptide"
SYVLTQSPSVSAAPGYTATISCGGNNIGTKSVHWYQQKPGQAPLLVIRDDSVRPSKIPGRFSGSNSGNMATLTISGVQAGDEADFYCQVWDSDSEHVVFGGGTKLTVL

SEQ ID NO: 1079 - protein, 484 aa, synthetic construct
  REGION 1..484: note = source = /note="Description of Artificial Sequence: Synthetic polypeptide"
MALPVTALLLPLALLLHAARPEVQLVESGGGLVKPGGSLRLSCAASGFTFSDYYMSWIRQAPGKGLEWVSYISSSGSTIYYADSVKGRFTISRDNAKNSLYLQMNSLRAEDTAVYYCARDLRGAFDIWGQGTMVTVSSGGGGSGGGGSGGGGSSYVLTQSPSVSAAPGYTATISCGGNNIGTKSVHWYQQKPGQAPLLVIRDDSVRPSKIPGRFSGSNSGNMATLTISGVQAGDEADFYCQVWDSDSEHVVFGGGTKLTVLTTTPAPRPPTPAPTIASQPLSLRPEACRPAAGGAVHTRGLDFACDIYIWAPLAGTCGVLLLSLVITLYCKRGRKKLLYIFKQPFMRPVQTTQEEDGCSCRFPEEEEGGCELRVKFSRSADAPAYKQGQNQLYNELNLGRREEYDVLDKRRGRDPEMGGKPRRKNPQEGLYNELQKDKMAEAYSEIGMKGERRRGKGHDGLYQGLSTATKDTYDALHMQALPPR

SEQ ID NO: 1080 - DNA, 1452 bp, synthetic construct
  misc_feature 1..1452: note = source = /note="Description of Artificial Sequence: Synthetic polynucleotide"
  source 1..1452: mol_type = other DNA
atggccctccctgtcaccgccctgctgcttccgctggctcttctgctccacgccgctcggcccgaagtccagctcgtggagtccggcggaggccttgtgaagcctggaggttcgctgagactgtcctgcgccgcctccggcttcaccttctccgactactacatgtcctggatcagacaggccccgggaaagggcctggaatgggtgtcctacatctcgtcatcgggcagcactatctactacgcggactcagtgaaggggcggttcaccatttcccgggataacgcgaagaactcgctgtatctgcaaatgaactcactgagggccgaggacaccgccgtgtactactgcgcccgcgatctccgcggggcatttgacatctggggacagggaaccatggtcacagtgtccagcggagggggaggatcgggtggcggaggttccgggggtggaggctcctcctacgtgctgactcagagcccaagcgtcagcgctgcgcccggttacacggcaaccatctcctgtggcggaaacaacattgggaccaagtctgtgcactggtatcagcagaagccgggccaagctcccctgttggtgatccgcgatgactccgtgcggcctagcaaaattccgggacggttctccggctccaacagcggcaatatggccactctcaccatctcgggagtgcaggccggagatgaagccgacttctactgccaagtctgggactcagactccgagcatgtggtgttcgggggcggaaccaagctgactgtgctcaccactaccccagcaccgaggccacccaccccggctcctaccatcgcctcccagcctctgtccctgcgtccggaggcatgtagacccgcagctggtggggccgtgcatacccggggtcttgacttcgcctgcgatatctacatttgggcccctctggctggtacttgcggggtcctgctgctttcactcgtgatcactctttactgtaagcgcggtcggaagaagctgctgtacatctttaagcaacccttcatgaggcctgtgcagactactcaagaggaggacggctgttcatgccggttcccagaggaggaggaaggcggctgcgaactgcgcgtgaaattcagccgcagcgcagatgctccagcctacaagcaggggcagaaccagctctacaacgaactcaatcttggtcggagagaggagtacgacgtgctggacaagcggagaggacgggacccagaaatgggcgggaagccgcgcagaaagaatccccaagagggcctgtacaacgagctccaaaaggataagatggcagaagcctatagcgagattggtatgaaaggggaacgcagaagaggcaaaggccacgacggactgtaccagggactcagcaccgccaccaaggacacctatgacgctcttcacatgcaggccctgccgcctcgg

SEQ ID NO: 1081 - protein, 241 aa, synthetic construct
  REGION 1..241: note = source = /note="Description of Artificial Sequence: Synthetic polypeptide"
QVQLVQSGAEVKKPGASVKVSCKPSGYTVTSHYIHWVRRAPGQGLEWMGMINPSGGVTAYSQTLQGRVTMTSDTSSSTVYMELSSLRSEDTAMYYCAREGSGSGWYFDFWGRGTLVTVSSGGGGSGGGGSGGGGSSYVLTQPPSVSVSPGQTASITCSGDGLSKKYVSWYQQKAGQSPVVLISRDKERPSGIPDRFSGSNSADTATLTISGTQAMDEADYYCQAWDDTTVVFGGGTKLTVL

SEQ ID NO: 1082 - DNA, 723 bp, synthetic construct
  misc_feature 1..723: note = source = /note="Description of Artificial Sequence: Synthetic polynucleotide"
  source 1..723: mol_type = other DNA
caagtgcagctggtgcagagcggggccgaagtcaagaagccgggagcctccgtgaaagtgtcctgcaagccttcgggatacaccgtgacctcccactacattcattgggtccgccgcgcccccggccaaggactcgagtggatgggcatgatcaaccctagcggcggagtgaccgcgtacagccagacgctgcagggacgcgtgactatgacctcggatacctcctcctccaccgtctatatggaactgtccagcctgcggtccgaggataccgccatgtactactgcgcccgggaaggatcaggctccgggtggtatttcgacttctggggaagaggcaccctcgtgactgtgtcatctgggggagggggttccggtggtggcggatcgggaggaggcggttcatcctacgtgctgacccagccaccctccgtgtccgtgagccccggccagactgcatcgattacatgtagcggcgacggcctctccaagaaatacgtgtcgtggtaccagcagaaggccggacagagcccggtggtgctgatctcaagagataaggagcggcctagcggaatcccggacaggttctcgggttccaactccgcggacactgctactctgaccatctcggggacccaggctatggacgaagccgattactactgccaagcctgggacgacactactgtcgtgtttggagggggcaccaagttgaccgtcctt

SEQ ID NO: 1083 - protein, 120 aa, synthetic construct
  REGION 1..120: note = source = /note="Description of Artificial Sequence: Synthetic polypeptide"
QVQLVQSGAEVKKPGASVKVSCKPSGYTVTSHYIHWVRRAPGQGLEWMGMINPSGGVTAYSQTLQGRVTMTSDTSSSTVYMELSSLRSEDTAMYYCAREGSGSGWYFDFWGRGTLVTVSS

SEQ ID NO: 1084 - protein, 106 aa, synthetic construct
  REGION 1..106: note = source = /note="Description of Artificial Sequence: Synthetic polypeptide"
SYVLTQPPSVSVSPGQTASITCSGDGLSKKYVSWYQQKAGQSPVVLISRDKERPSGIPDRFSGSNSADTATLTISGTQAMDEADYYCQAWDDTTVVFGGGTKLTVL

SEQ ID NO: 1085 - protein, 485 aa, synthetic construct
  REGION 1..485: note = source = /note="Description of Artificial Sequence: Synthetic polypeptide"
MALPVTALLLPLALLLHAARPQVQLVQSGAEVKKPGASVKVSCKPSGYTVTSHYIHWVRRAPGQGLEWMGMINPSGGVTAYSQTLQGRVTMTSDTSSSTVYMELSSLRSEDTAMYYCAREGSGSGWYFDFWGRGTLVTVSSGGGGSGGGGSGGGGSSYVLTQPPSVSVSPGQTASITCSGDGLSKKYVSWYQQKAGQSPVVLISRDKERPSGIPDRFSGSNSADTATLTISGTQAMDEADYYCQAWDDTTVVFGGGTKLTVLTTTPAPRPPTPAPTIASQPLSLRPEACRPAAGGAVHTRGLDFACDIYIWAPLAGTCGVLLLSLVITLYCKRGRKKLLYIFKQPFMRPVQTTQEEDGCSCRFPEEEEGGCELRVKFSRSADAPAYKQGQNQLYNELNLGRREEYDVLDKRRGRDPEMGGKPRRKNPQEGLYNELQKDKMAEAYSEIGMKGERRRGKGHDGLYQGLSTATKDTYDALHMQALPPR

SEQ ID NO: 1086 - DNA, 1455 bp, synthetic construct
  misc_feature 1..1455: note = source = /note="Description of Artificial Sequence: Synthetic polynucleotide"
  source 1..1455: mol_type = other DNA
atggccctccctgtcaccgccctgctgcttccgctggctcttctgctccacgccgctcggccccaagtgcagctggtgcagagcggggccgaagtcaagaagccgggagcctccgtgaaagtgtcctgcaagccttcgggatacaccgtgacctcccactacattcattgggtccgccgcgcccccggccaaggactcgagtggatgggcatgatcaaccctagcggcggagtgaccgcgtacagccagacgctgcagggacgcgtgactatgacctcggatacctcctcctccaccgtctatatggaactgtccagcctgcggtccgaggataccgccatgtactactgcgcccgggaaggatcaggctccgggtggtatttcgacttctggggaagaggcaccctcgtgactgtgtcatctgggggagggggttccggtggtggcggatcgggaggaggcggttcatcctacgtgctgacccagccaccctccgtgtccgtgagccccggccagactgcatcgattacatgtagcggcgacggcctctccaagaaatacgtgtcgtggtaccagcagaaggccggacagagcccggtggtgctgatctcaagagataaggagcggcctagcggaatcccggacaggttctcgggttccaactccgcggacactgctactctgaccatctcggggacccaggctatggacgaagccgattactactgccaagcctgggacgacactactgtcgtgtttggagggggcaccaagttgaccgtccttaccactaccccagcaccgaggccacccaccccggctcctaccatcgcctcccagcctctgtccctgcgtccggaggcatgtagacccgcagctggtggggccgtgcatacccggggtcttgacttcgcctgcgatatctacatttgggcccctctggctggtacttgcggggtcctgctgctttcactcgtgatcactctttactgtaagcgcggtcggaagaagctgctgtacatctttaagcaacccttcatgaggcctgtgcagactactcaagaggaggacggctgttcatgccggttcccagaggaggaggaaggcggctgcgaactgcgcgtgaaattcagccgcagcgcagatgctccagcctacaagcaggggcagaaccagctctacaacgaactcaatcttggtcggagagaggagtacgacgtgctggacaagcggagaggacgggacccagaaatgggcgggaagccgcgcagaaagaatccccaagagggcctgtacaacgagctccaaaaggataagatggcagaagcctatagcgagattggtatgaaaggggaacgcagaagaggcaaaggccacgacggactgtaccagggactcagcaccgccaccaaggacacctatgacgctcttcacatgcaggccctgccgcctcgg

SEQ ID NO: 1087 - protein, 245 aa, synthetic construct
  REGION 1..245: note = source = /note="Description of Artificial Sequence: Synthetic polypeptide"
QVQLQESGPGLVKPSQTLSLTCTVSGGSISSGGYYWSWIRQHPGKGLEWIGYIYYSGSTYYNPSLKSRVTISVDTSKNQFSLKLSSVTAADTAVYYCARAGIAARLRGAFDIWGQGTMVTVSSGGGGSGGGGSGGGGSDIVMTQSPSSVSASVGDRVIITCRASQGIRNWLAWYQQKPGKAPNLLIYAASNLQSGVPSRFSGSGSGADFTLTISSLQPEDVATYYCQKYNSAPFTFGPGTKVDIK

SEQ ID NO: 1088 - DNA, 735 bp, synthetic construct
  misc_feature 1..735: note = source = /note="Description of Artificial Sequence: Synthetic polynucleotide"
  source 1..735: mol_type = other DNA
caagtgcagcttcaggagagcggcccgggactcgtgaagccgtcccagaccctgtccctgacttgcaccgtgtcgggaggaagcatctcgagcggaggctactattggtcgtggattcggcagcaccctggaaagggcctggaatggatcggctacatctactactccggctcgacctactacaacccatcgctgaagtccagagtgacaatctcagtggacacgtccaagaatcagttcagcctgaagctctcttccgtgactgcggccgacaccgccgtgtactactgcgcacgcgctggaattgccgcccggctgaggggtgccttcgacatttggggacagggcaccatggtcaccgtgtcctccggcggcggaggttccgggggtggaggctcaggaggaggggggtccgacatcgtcatgactcagtcgccctcaagcgtcagcgcgtccgtcggggacagagtgatcatcacctgtcgggcgtcccagggaattcgcaactggctggcctggtatcagcagaagcccggaaaggcccccaacctgttgatctacgccgcctcaaacctccaatccggggtgccgagccgcttcagcggctccggttcgggtgccgatttcactctgaccatctcctccctgcaacctgaagatgtggctacctactactgccaaaagtacaactccgcaccttttactttcggaccggggaccaaagtggacattaag

SEQ ID NO: 1089 - protein, 123 aa, synthetic construct
  REGION 1..123: note = source = /note="Description of Artificial Sequence: Synthetic polypeptide"
QVQLQESGPGLVKPSQTLSLTCTVSGGSISSGGYYWSWIRQHPGKGLEWIGYIYYSGSTYYNPSLKSRVTISVDTSKNQFSLKLSSVTAADTAVYYCARAGIAARLRGAFDIWGQGTMVTVSS

SEQ ID NO: 1090 - protein, 107 aa, synthetic construct
  REGION 1..107: note = source = /note="Description of Artificial Sequence: Synthetic polypeptide"
DIVMTQSPSSVSASVGDRVIITCRASQGIRNWLAWYQQKPGKAPNLLIYAASNLQSGVPSRFSGSGSGADFTLTISSLQPEDVATYYCQKYNSAPFTFGPGTKVDIK

SEQ ID NO: 1091 - protein, 489 aa, synthetic construct
  REGION 1..489: note = source = /note="Description of Artificial Sequence: Synthetic polypeptide"
MALPVTALLLPLALLLHAARPQVQLQESGPGLVKPSQTLSLTCTVSGGSISSGGYYWSWIRQHPGKGLEWIGYIYYSGSTYYNPSLKSRVTISVDTSKNQFSLKLSSVTAADTAVYYCARAGIAARLRGAFDIWGQGTMVTVSSGGGGSGGGGSGGGGSDIVMTQSPSSVSASVGDRVIITCRASQGIRNWLAWYQQKPGKAPNLLIYAASNLQSGVPSRFSGSGSGADFTLTISSLQPEDVATYYCQKYNSAPFTFGPGTKVDIKTTTPAPRPPTPAPTIASQPLSLRPEACRPAAGGAVHTRGLDFACDIYIWAPLAGTCGVLLLSLVITLYCKRGRKKLLYIFKQPFMRPVQTTQEEDGCSCRFPEEEEGGCELRVKFSRSADAPAYKQGQNQLYNELNLGRREEYDVLDKRRGRDPEMGGKPRRKNPQEGLYNELQKDKMAEAYSEIGMKGERRRGKGHDGLYQGLSTATKDTYDALHMQALPPR

SEQ ID NO: 1092 - DNA, 1467 bp, synthetic construct
  misc_feature 1..1467: note = source = /note="Description of Artificial Sequence: Synthetic polynucleotide"
  source 1..1467: mol_type = other DNA
atggccctccctgtcaccgccctgctgcttccgctggctcttctgctccacgccgctcggccccaagtgcagcttcaggagagcggcccgggactcgtgaagccgtcccagaccctgtccctgacttgcaccgtgtcgggaggaagcatctcgagcggaggctactattggtcgtggattcggcagcaccctggaaagggcctggaatggatcggctacatctactactccggctcgacctactacaacccatcgctgaagtccagagtgacaatctcagtggacacgtccaagaatcagttcagcctgaagctctcttccgtgactgcggccgacaccgccgtgtactactgcgcacgcgctggaattgccgcccggctgaggggtgccttcgacatttggggacagggcaccatggtcaccgtgtcctccggcggcggaggttccgggggtggaggctcaggaggaggggggtccgacatcgtcatgactcagtcgccctcaagcgtcagcgcgtccgtcggggacagagtgatcatcacctgtcgggcgtcccagggaattcgcaactggctggcctggtatcagcagaagcccggaaaggcccccaacctgttgatctacgccgcctcaaacctccaatccggggtgccgagccgcttcagcggctccggttcgggtgccgatttcactctgaccatctcctccctgcaacctgaagatgtggctacctactactgccaaaagtacaactccgcaccttttactttcggaccggggaccaaagtggacattaagaccactaccccagcaccgaggccacccaccccggctcctaccatcgcctcccagcctctgtccctgcgtccggaggcatgtagacccgcagctggtggggccgtgcatacccggggtcttgacttcgcctgcgatatctacatttgggcccctctggctggtacttgcggggtcctgctgctttcactcgtgatcactctttactgtaagcgcggtcggaagaagctgctgtacatctttaagcaacccttcatgaggcctgtgcagactactcaagaggaggacggctgttcatgccggttcccagaggaggaggaaggcggctgcgaactgcgcgtgaaattcagccgcagcgcagatgctccagcctacaagcaggggcagaaccagctctacaacgaactcaatcttggtcggagagaggagtacgacgtgctggacaagcggagaggacgggacccagaaatgggcgggaagccgcgcagaaagaatccccaagagggcctgtacaacgagctccaaaaggataagatggcagaagcctatagcgagattggtatgaaaggggaacgcagaagaggcaaaggccacgacggactgtaccagggactcagcaccgccaccaaggacacctatgacgctcttcacatgcaggccctgccgcctcgg

SEQ ID NO: 1093 - protein, 253 aa, synthetic construct
  REGION 1..253: note = source = /note="Description of Artificial Sequence: Synthetic polypeptide"
QVQLVQSGAEVKKPGSSVKVSCKASGGTFSSYAISWVRQAPGQGLEWMGGIIPIFGTANYAQKFQGRVTITADESTSTAYMELSSLRSEDTAVYYCARRGGYQLLRWDVGLLRSAFDIWGQGTMVTVSSGGGGSGGGGSGGGGSSYVLTQPPSVSVAPGQTARITCGGNNIGSKSVHWYQQKPGQAPVLVLYGKNNRPSGVPDRFSGSRSGTTASLTITGAQAEDEADYYCSSRDSSGDHLRVFGTGTKVTVL

SEQ ID NO: 1094 - DNA, 759 bp, synthetic construct
  misc_feature 1..759: note = source = /note="Description of Artificial Sequence: Synthetic polynucleotide"
  source 1..759: mol_type = other DNA
caagtgcagctggtccagtcgggcgccgaggtcaagaagcccgggagctctgtgaaagtgtcctgcaaggcctccgggggcacctttagctcctacgccatctcctgggtccgccaagcaccgggtcaaggcctggagtggatggggggaattatccctatcttcggcactgccaactacgcccagaagttccagggacgcgtgaccattaccgcggacgaatccacctccaccgcttatatggagctgtccagcttgcgctcggaagataccgccgtgtactactgcgcccggaggggtggataccagctgctgagatgggacgtgggcctcctgcggtcggcgttcgacatctggggccagggcactatggtcactgtgtccagcggaggaggcggatcgggaggcggcggatcagggggaggcggttccagctacgtgcttactcaacccccttcggtgtccgtggccccgggacagaccgccagaatcacttgcggaggaaacaacattgggtccaagagcgtgcattggtaccagcagaagccaggacaggcccctgtgctggtgctctacgggaagaacaatcggcccagcggagtgccggacaggttctcgggttcacgctccggtacaaccgcttcactgactatcaccggggcccaggcagaggatgaagcggactactactgttcctcccgggattcatccggcgaccacctccgggtgttcggaaccggaacgaaggtcaccgtgctg

SEQ ID NO: 1095 - protein, 129 aa, synthetic construct
  REGION 1..129: note = source = /note="Description of Artificial Sequence: Synthetic polypeptide"
QVQLVQSGAEVKKPGSSVKVSCKASGGTFSSYAISWVRQAPGQGLEWMGGIIPIFGTANYAQKFQGRVTITADESTSTAYMELSSLRSEDTAVYYCARRGGYQLLRWDVGLLRSAFDIWGQGTMVTVSS

SEQ ID NO: 1096 - protein, 109 aa, synthetic construct
  REGION 1..109: note = source = /note="Description of Artificial Sequence: Synthetic polypeptide"
SYVLTQPPSVSVAPGQTARITCGGNNIGSKSVHWYQQKPGQAPVLVLYGKNNRPSGVPDRFSGSRSGTTASLTITGAQAEDEADYYCSSRDSSGDHLRVFGTGTKVTVL

SEQ ID NO: 1097 - protein, 497 aa, synthetic construct
  REGION 1..497: note = source = /note="Description of Artificial Sequence: Synthetic polypeptide"
MALPVTALLLPLALLLHAARPQVQLVQSGAEVKKPGSSVKVSCKASGGTFSSYAISWVRQAPGQGLEWMGGIIPIFGTANYAQKFQGRVTITADESTSTAYMELSSLRSEDTAVYYCARRGGYQLLRWDVGLLRSAFDIWGQGTMVTVSSGGGGSGGGGSGGGGSSYVLTQPPSVSVAPGQTARITCGGNNIGSKSVHWYQQKPGQAPVLVLYGKNNRPSGVPDRFSGSRSGTTASLTITGAQAEDEADYYCSSRDSSGDHLRVFGTGTKVTVLTTTPAPRPPTPAPTIASQPLSLRPEACRPAAGGAVHTRGLDFACDIYIWAPLAGTCGVLLLSLVITLYCKRGRKKLLYIFKQPFMRPVQTTQEEDGCSCRFPEEEEGGCELRVKFSRSADAPAYKQGQNQLYNELNLGRREEYDVLDKRRGRDPEMGGKPRRKNPQEGLYNELQKDKMAEAYSEIGMKGERRRGKGHDGLYQGLSTATKDTYDALHMQALPPR

SEQ ID NO: 1098 - DNA, 1491 bp, synthetic construct
  misc_feature 1..1491: note = source = /note="Description of Artificial Sequence: Synthetic polynucleotide"
  source 1..1491: mol_type = other DNA
atggccctccctgtcaccgccctgctgcttccgctggctcttctgctccacgccgctcggccccaagtgcagctggtccagtcgggcgccgaggtcaagaagcccgggagctctgtgaaagtgtcctgcaaggcctccgggggcacctttagctcctacgccatctcctgggtccgccaagcaccgggtcaaggcctggagtggatggggggaattatccctatcttcggcactgccaactacgcccagaagttccagggacgcgtgaccattaccgcggacgaatccacctccaccgcttatatggagctgtccagcttgcgctcggaagataccgccgtgtactactgcgcccggaggggtggataccagctgctgagatgggacgtgggcctcctgcggtcggcgttcgacatctggggccagggcactatggtcactgtgtccagcggaggaggcggatcgggaggcggcggatcagggggaggcggttccagctacgtgcttactcaacccccttcggtgtccgtggccccgggacagaccgccagaatcacttgcggaggaaacaacattgggtccaagagcgtgcattggtaccagcagaagccaggacaggcccctgtgctggtgctctacgggaagaacaatcggcccagcggagtgccggacaggttctcgggttcacgctccggtacaaccgcttcactgactatcaccggggcccaggcagaggatgaagcggactactactgttcctcccgggattcatccggcgaccacctccgggtgttcggaaccggaacgaaggtcaccgtgctgaccactaccccagcaccgaggccacccaccccggctcctaccatcgcctcccagcctctgtccctgcgtccggaggcatgtagacccgcagctggtggggccgtgcatacccggggtcttgacttcgcctgcgatatctacatttgggcccctctggctggtacttgcggggtcctgctgctttcactcgtgatcactctttactgtaagcgcggtcggaagaagctgctgtacatctttaagcaacccttcatgaggcctgtgcagactactcaagaggaggacggctgttcatgccggttcccagaggaggaggaaggcggctgcgaactgcgcgtgaaattcagccgcagcgcagatgctccagcctacaagcaggggcagaaccagctctacaacgaactcaatcttggtcggagagaggagtacgacgtgctggacaagcggagaggacgggacccagaaatgggcgggaagccgcgcagaaagaatccccaagagggcctgtacaacgagctccaaaaggataagatggcagaagcctatagcgagattggtatgaaaggggaacgcagaagaggcaaaggccacgacggactgtaccagggactcagcaccgccaccaaggacacctatgacgctcttcacatgcaggccctgccgcctcgg

SEQ ID NO: 1099 - protein, 248 aa, synthetic construct
  REGION 1..248: note = source = /note="Description of Artificial Sequence: Synthetic polypeptide"
EVQLQQSGPGLVKPSQTLSLTCAISGDSVSSNSAAWNWIRQSPSRGLEWLGRTYYRSKWYSFYAISLKSRIIINPDTSKNQFSLQLKSVTPEDTAVYYCARSSPEGLFLYWFDPWGQGTLVTVSSGGDGSGGGGSGGGGSSSELTQDPAVSVALGQTIRITCQGDSLGNYYATWYQQKPGQAPVLVIYGTNNRPSGIPDRFSASSSGNTASLTITGAQAEDEADYYCNSRDSSGHHLLFGTGTKVTVL

SEQ ID NO: 1100 - DNA, 744 bp, synthetic construct
  misc_feature 1..744: note = source = /note="Description of Artificial Sequence: Synthetic polynucleotide"
  source 1..744: mol_type = other DNA
gaagtgcagctccaacagtcaggaccggggctcgtgaagccatcccagaccctgtccctgacttgtgccatctcgggagatagcgtgtcatcgaactccgccgcctggaactggattcggcagagcccgtcccgcggactggagtggcttggaaggacctactaccggtccaagtggtactctttctacgcgatctcgctgaagtcccgcattatcattaaccctgatacctccaagaatcagttctccctccaactgaaatccgtcacccccgaggacacagcagtgtattactgcgcacggagcagccccgaaggactgttcctgtattggtttgacccctggggccaggggactcttgtgaccgtgtcgagcggcggagatgggtccggtggcggtggttcggggggcggcggatcatcatccgaactgacccaggacccggctgtgtccgtggcgctgggacaaaccatccgcattacgtgccagggagactccctgggcaactactacgccacttggtaccagcagaagccgggccaagcccctgtgttggtcatctacgggaccaacaacagaccttccggcatccccgaccggttcagcgcttcgtcctccggcaacactgccagcctgaccatcactggagcgcaggccgaagatgaggccgactactactgcaacagcagagactcctcgggtcatcacctcttgttcggaactggaaccaaggtcaccgtgctg

SEQ ID NO: 1101 - protein, 125 aa, synthetic construct
  REGION 1..125: note = source = /note="Description of Artificial Sequence: Synthetic polypeptide"
EVQLQQSGPGLVKPSQTLSLTCAISGDSVSSNSAAWNWIRQSPSRGLEWLGRTYYRSKWYSFYAISLKSRIIINPDTSKNQFSLQLKSVTPEDTAVYYCARSSPEGLFLYWFDPWGQGTLVTVSS

SEQ ID NO: 1102 - protein, 108 aa, synthetic construct
  REGION 1..108: note = source = /note="Description of Artificial Sequence: Synthetic polypeptide"
SSELTQDPAVSVALGQTIRITCQGDSLGNYYATWYQQKPGQAPVLVIYGTNNRPSGIPDRFSASSSGNTASLTITGAQAEDEADYYCNSRDSSGHHLLFGTGTKVTVL

SEQ ID NO: 1103 - protein, 492 aa, synthetic construct
  REGION 1..492: note = source = /note="Description of Artificial Sequence: Synthetic polypeptide"
MALPVTALLLPLALLLHAARPEVQLQQSGPGLVKPSQTLSLTCAISGDSVSSNSAAWNWIRQSPSRGLEWLGRTYYRSKWYSFYAISLKSRIIINPDTSKNQFSLQLKSVTPEDTAVYYCARSSPEGLFLYWFDPWGQGTLVTVSSGGDGSGGGGSGGGGSSSELTQDPAVSVALGQTIRITCQGDSLGNYYATWYQQKPGQAPVLVIYGTNNRPSGIPDRFSASSSGNTASLTITGAQAEDEADYYCNSRDSSGHHLLFGTGTKVTVLTTTPAPRPPTPAPTIASQPLSLRPEACRPAAGGAVHTRGLDFACDIYIWAPLAGTCGVLLLSLVITLYCKRGRKKLLYIFKQPFMRPVQTTQEEDGCSCRFPEEEEGGCELRVKFSRSADAPAYKQGQNQLYNELNLGRREEYDVLDKRRGRDPEMGGKPRRKNPQEGLYNELQKDKMAEAYSEIGMKGERRRGKGHDGLYQGLSTATKDTYDALHMQALPPR

SEQ ID NO: 1104 - DNA, 1476 bp, synthetic construct
  misc_feature 1..1476: note = source = /note="Description of Artificial Sequence: Synthetic polynucleotide"
  source 1..1476: mol_type = other DNA
atggccctccctgtcaccgccctgctgcttccgctggctcttctgctccacgccgctcggcccgaagtgcagctccaacagtcaggaccggggctcgtgaagccatcccagaccctgtccctgacttgtgccatctcgggagatagcgtgtcatcgaactccgccgcctggaactggattcggcagagcccgtcccgcggactggagtggcttggaaggacctactaccggtccaagtggtactctttctacgcgatctcgctgaagtcccgcattatcattaaccctgatacctccaagaatcagttctccctccaactgaaatccgtcacccccgaggacacagcagtgtattactgcgcacggagcagccccgaaggactgttcctgtattggtttgacccctggggccaggggactcttgtgaccgtgtcgagcggcggagatgggtccggtggcggtggttcggggggcggcggatcatcatccgaactgacccaggacccggctgtgtccgtggcgctgggacaaaccatccgcattacgtgccagggagactccctgggcaactactacgccacttggtaccagcagaagccgggccaagcccctgtgttggtcatctacgggaccaacaacagaccttccggcatccccgaccggttcagcgcttcgtcctccggcaacactgccagcctgaccatcactggagcgcaggccgaagatgaggccgactactactgcaacagcagagactcctcgggtcatcacctcttgttcggaactggaaccaaggtcaccgtgctgaccactaccccagcaccgaggccacccaccccggctcctaccatcgcctcccagcctctgtccctgcgtccggaggcatgtagacccgcagctggtggggccgtgcatacccggggtcttgacttcgcctgcgatatctacatttgggcccctctggctggtacttgcggggtcctgctgctttcactcgtgatcactctttactgtaagcgcggtcggaagaagctgctgtacatctttaagcaacccttcatgaggcctgtgcagactactcaagaggaggacggctgttcatgccggttcccagaggaggaggaaggcggctgcgaactgcgcgtgaaattcagccgcagcgcagatgctccagcctacaagcaggggcagaaccagctctacaacgaactcaatcttggtcggagagaggagtacgacgtgctggacaagcggagaggacgggacccagaaatgggcgggaagccgcgcagaaagaatccccaagagggcctgtacaacgagctccaaaaggataagatggcagaagcctatagcgagattggtatgaaaggggaacgcagaagaggcaaaggccacgacggactgtaccagggactcagcaccgccaccaaggacacctatgacgctcttcacatgcaggccctgccgcctcgg

SEQ ID NO: 1105 - protein, 246 aa, synthetic construct
  REGION 1..246: note = source = /note="Description of Artificial Sequence: Synthetic polypeptide"
EVQLVESGGGLVQPGGSLRLSCAASGFTFSSYAMSWVRQAPGKGLEWVSAISGSGGSTYYADSVKGRFTISRDNSKNTLYLQMNSLRAEDTAVYYCAKVEGSGSLDYWGQGTLVTVSSGGGGSGGGGSGGGGSEIVMTQSPGTLSLSPGERATLSCRASQSVSSAYLAWYQQKPGQPPRLLISGASTRATGIPDRFGGSGSGTDFTLTISRLEPEDFAVYYCQHYGSSFNGSSLFTFGQGTRLEIK

SEQ ID NO: 1106 - DNA, 738 bp, synthetic construct
  misc_feature 1..738: note = source = /note="Description of Artificial Sequence: Synthetic polynucleotide"
  source 1..738: mol_type = other DNA
gaagtgcagctcgtggagtcaggaggcggcctggtccagccgggagggtcccttagactgtcatgcgccgcaagcggattcactttctcctcctatgccatgagctgggtccgccaagcccccggaaagggactggaatgggtgtccgccatctcggggtctggaggctcaacttactacgctgactccgtgaagggacggttcaccattagccgcgacaactccaagaacaccctctacctccaaatgaactccctgcgggccgaggataccgccgtctactactgcgccaaagtggaaggttcaggatcgctggactactggggacagggtactctcgtgaccgtgtcatcgggcggaggaggttccggcggtggcggctccggcggcggagggtcggagatcgtgatgacccagagccctggtactctgagcctttcgccgggagaaagggccaccctgtcctgccgcgcttcccaatccgtgtcctccgcgtacttggcgtggtaccagcagaagccgggacagccccctcggctgctgatcagcggggccagcacccgggcaaccggaatcccagacagattcgggggttccggcagcggcacagatttcaccctgactatttcgaggttggagcccgaggactttgcggtgtattactgtcagcactacgggtcgtcctttaatggctccagcctgttcacgttcggacaggggacccgcctggaaatcaag

SEQ ID NO: 1107 - protein, 118 aa, synthetic construct
  REGION 1..118: note = source = /note="Description of Artificial Sequence: Synthetic polypeptide"
EVQLVESGGGLVQPGGSLRLSCAASGFTFSSYAMSWVRQAPGKGLEWVSAISGSGGSTYYADSVKGRFTISRDNSKNTLYLQMNSLRAEDTAVYYCAKVEGSGSLDYWGQGTLVTVSS

SEQ ID NO: 1108 - protein, 113 aa, synthetic construct
  REGION 1..113: note = source = /note="Description of Artificial Sequence: Synthetic polypeptide"
EIVMTQSPGTLSLSPGERATLSCRASQSVSSAYLAWYQQKPGQPPRLLISGASTRATGIPDRFGGSGSGTDFTLTISRLEPEDFAVYYCQHYGSSFNGSSLFTFGQGTRLEIK

SEQ ID NO: 1109 - protein, 490 aa, synthetic construct
  REGION 1..490: note = source = /note="Description of Artificial Sequence: Synthetic polypeptide"
MALPVTALLLPLALLLHAARPEVQLVESGGGLVQPGGSLRLSCAASGFTFSSYAMSWVRQAPGKGLEWVSAISGSGGSTYYADSVKGRFTISRDNSKNTLYLQMNSLRAEDTAVYYCAKVEGSGSLDYWGQGTLVTVSSGGGGSGGGGSGGGGSEIVMTQSPGTLSLSPGERATLSCRASQSVSSAYLAWYQQKPGQPPRLLISGASTRATGIPDRFGGSGSGTDFTLTISRLEPEDFAVYYCQHYGSSFNGSSLFTFGQGTRLEIKTTTPAPRPPTPAPTIASQPLSLRPEACRPAAGGAVHTRGLDFACDIYIWAPLAGTCGVLLLSLVITLYCKRGRKKLLYIFKQPFMRPVQTTQEEDGCSCRFPEEEEGGCELRVKFSRSADAPAYKQGQNQLYNELNLGRREEYDVLDKRRGRDPEMGGKPRRKNPQEGLYNELQKDKMAEAYSEIGMKGERRRGKGHDGLYQGLSTATKDTYDALHMQALPPR

SEQ ID NO: 1110 - DNA, 1470 bp, synthetic construct
  misc_feature 1..1470: note = source = /note="Description of Artificial Sequence: Synthetic polynucleotide"
  source 1..1470: mol_type = other DNA
atggccctccctgtcaccgccctgctgcttccgctggctcttctgctccacgccgctcggcccgaagtgcagctcgtggagtcaggaggcggcctggtccagccgggagggtcccttagactgtcatgcgccgcaagcggattcactttctcctcctatgccatgagctgggtccgccaagcccccggaaagggactggaatgggtgtccgccatctcggggtctggaggctcaacttactacgctgactccgtgaagggacggttcaccattagccgcgacaactccaagaacaccctctacctccaaatgaactccctgcgggccgaggataccgccgtctactactgcgccaaagtggaaggttcaggatcgctggactactggggacagggtactctcgtgaccgtgtcatcgggcggaggaggttccggcggtggcggctccggcggcggagggtcggagatcgtgatgacccagagccctggtactctgagcctttcgccgggagaaagggccaccctgtcctgccgcgcttcccaatccgtgtcctccgcgtacttggcgtggtaccagcagaagccgggacagccccctcggctgctgatcagcggggccagcacccgggcaaccggaatcccagacagattcgggggttccggcagcggcacagatttcaccctgactatttcgaggttggagcccgaggactttgcggtgtattactgtcagcactacgggtcgtcctttaatggctccagcctgttcacgttcggacaggggacccgcctggaaatcaagaccactaccccagcaccgaggccacccaccccggctcctaccatcgcctcccagcctctgtccctgcgtccggaggcatgtagacccgcagctggtggggccgtgcatacccggggtcttgacttcgcctgcgatatctacatttgggcccctctggctggtacttgcggggtcctgctgctttcactcgtgatcactctttactgtaagcgcggtcggaagaagctgctgtacatctttaagcaacccttcatgaggcctgtgcagactactcaagaggaggacggctgttcatgccggttcccagaggaggaggaaggcggctgcgaactgcgcgtgaaattcagccgcagcgcagatgctccagcctacaagcaggggcagaaccagctctacaacgaactcaatcttggtcggagagaggagtacgacgtgctggacaagcggagaggacgggacccagaaatgggcgggaagccgcgcagaaagaatccccaagagggcctgtacaacgagctccaaaaggataagatggcagaagcctatagcgagattggtatgaaaggggaacgcagaagaggcaaaggccacgacggactgtaccagggactcagcaccgccaccaaggacacctatgacgctcttcacatgcaggccctgccgcctcgg

SEQ ID NO: 1111 - protein, 241 aa, synthetic construct
  REGION 1..241: note = source = /note="Description of Artificial Sequence: Synthetic polypeptide"
EVQLVETGGGLVQPGGSLRLSCAASGITFSRYPMSWVRQAPGKGLEWVSGISDSGVSTYYADSAKGRFTISRDNSKNTLFLQMSSLRDEDTAVYYCVTRAGSEASDIWGQGTMVTVSSGGGGSGGGGSGGGGSEIVLTQSPATLSLSPGERATLSCRASQSVSNSLAWYQQKPGQAPRLLIYDASSRATGIPDRFSGSGSGTDFTLTISRLEPEDFAIYYCQQFGTSSGLTFGGGTKLEIK

SEQ ID NO: 1112 - DNA, 723 bp, synthetic construct
  misc_feature 1..723: note = source = /note="Description of Artificial Sequence: Synthetic polynucleotide"
  source 1..723: mol_type = other DNA
gaagtgcaactggtggaaaccggtggcggcctggtgcagcctggaggatcattgaggctgtcatgcgcggccagcggtattaccttctcccggtaccccatgtcctgggtcagacaggccccggggaaagggcttgaatgggtgtccgggatctcggactccggtgtcagcacttactacgccgactccgccaagggacgcttcaccatttcccgggacaactcgaagaacaccctgttcctccaaatgagctccctccgggacgaggatactgcagtgtactactgcgtgacccgcgccgggtccgaggcgtctgacatttggggacagggcactatggtcaccgtgtcgtccggcggagggggctcgggaggcggtggcagcggaggaggagggtccgagatcgtgctgacccaatccccggccaccctctcgctgagccctggagaaagggcaaccttgtcctgtcgcgcgagccagtccgtgagcaactccctggcctggtaccagcagaagcccggacaggctccgagacttctgatctacgacgcttcgagccgggccactggaatccccgaccgcttttcggggtccggctcaggaaccgatttcaccctgacaatctcacggctggagccagaggatttcgccatctattactgccagcagttcggtacttcctccggcctgactttcggaggcggcacgaagctcgaaatcaag

SEQ ID NO: 1113 - protein, 118 aa, synthetic construct
  REGION 1..118: note = source = /note="Description of Artificial Sequence: Synthetic polypeptide"
EVQLVETGGGLVQPGGSLRLSCAASGITFSRYPMSWVRQAPGKGLEWVSGISDSGVSTYYADSAKGRFTISRDNSKNTLFLQMSSLRDEDTAVYYCVTRAGSEASDIWGQGTMVTVSS

SEQ ID NO: 1114 - protein, 108 aa, synthetic construct
  REGION 1..108: note = source = /note="Description of Artificial Sequence: Synthetic polypeptide"
EIVLTQSPATLSLSPGERATLSCRASQSVSNSLAWYQQKPGQAPRLLIYDASSRATGIPDRFSGSGSGTDFTLTISRLEPEDFAIYYCQQFGTSSGLTFGGGTKLEIK

SEQ ID NO: 1115 - protein, 485 aa, synthetic construct
  REGION 1..485: note = source = /note="Description of Artificial Sequence: Synthetic polypeptide"
MALPVTALLLPLALLLHAARPEVQLVETGGGLVQPGGSLRLSCAASGITFSRYPMSWVRQAPGKGLEWVSGISDSGVSTYYADSAKGRFTISRDNSKNTLFLQMSSLRDEDTAVYYCVTRAGSEASDIWGQGTMVTVSSGGGGSGGGGSGGGGSEIVLTQSPATLSLSPGERATLSCRASQSVSNSLAWYQQKPGQAPRLLIYDASSRATGIPDRFSGSGSGTDFTLTISRLEPEDFAIYYCQQFGTSSGLTFGGGTKLEIKTTTPAPRPPTPAPTIASQPLSLRPEACRPAAGGAVHTRGLDFACDIYIWAPLAGTCGVLLLSLVITLYCKRGRKKLLYIFKQPFMRPVQTTQEEDGCSCRFPEEEEGGCELRVKFSRSADAPAYKQGQNQLYNELNLGRREEYDVLDKRRGRDPEMGGKPRRKNPQEGLYNELQKDKMAEAYSEIGMKGERRRGKGHDGLYQGLSTATKDTYDALHMQALPPR

SEQ ID NO: 1116 - DNA, 1455 bp, synthetic construct
  misc_feature 1..1455: note = source = /note="Description of Artificial Sequence: Synthetic polynucleotide"
  source 1..1455: mol_type = other DNA
atggccctccctgtcaccgccctgctgcttccgctggctcttctgctccacgccgctcggcccgaagtgcaactggtggaaaccggtggcggcctggtgcagcctggaggatcattgaggctgtcatgcgcggccagcggtattaccttctcccggtaccccatgtcctgggtcagacaggccccggggaaagggcttgaatgggtgtccgggatctcggactccggtgtcagcacttactacgccgactccgccaagggacgcttcaccatttcccgggacaactcgaagaacaccctgttcctccaaatgagctccctccgggacgaggatactgcagtgtactactgcgtgacccgcgccgggtccgaggcgtctgacatttggggacagggcactatggtcaccgtgtcgtccggcggagggggctcgggaggcggtggcagcggaggaggagggtccgagatcgtgctgacccaatccccggccaccctctcgctgagccctggagaaagggcaaccttgtcctgtcgcgcgagccagtccgtgagcaactccctggcctggtaccagcagaagcccggacaggctccgagacttctgatctacgacgcttcgagccgggccactggaatccccgaccgcttttcggggtccggctcaggaaccgatttcaccctgacaatctcacggctggagccagaggatttcgccatctattactgccagcagttcggtacttcctccggcctgactttcggaggcggcacgaagctcgaaatcaagaccactaccccagcaccgaggccacccaccccggctcctaccatcgcctcccagcctctgtccctgcgtccggaggcatgtagacccgcagctggtggggccgtgcatacccggggtcttgacttcgcctgcgatatctacatttgggcccctctggctggtacttgcggggtcctgctgctttcactcgtgatcactctttactgtaagcgcggtcggaagaagctgctgtacatctttaagcaacccttcatgaggcctgtgcagactactcaagaggaggacggctgttcatgccggttcccagaggaggaggaaggcggctgcgaactgcgcgtgaaattcagccgcagcgcagatgctccagcctacaagcaggggcagaaccagctctacaacgaactcaatcttggtcggagagaggagtacgacgtgctggacaagcggagaggacgggacccagaaatgggcgggaagccgcgcagaaagaatccccaagagggcctgtacaacgagctccaaaaggataagatggcagaagcctatagcgagattggtatgaaaggggaacgcagaagaggcaaaggccacgacggactgtaccagggactcagcaccgccaccaaggacacctatgacgctcttcacatgcaggccctgccgcctcgg

SEQ ID NO: 1117 - protein, 248 aa, synthetic construct
  REGION 1..248: note = source = /note="Description of Artificial Sequence: Synthetic polypeptide"
QVQLVESGGGLVQPGGSLRLSCAASGFTFSSYAMSWVRQAPGKGLEWVSAISGSGGSTYYADSVKGRFTISRDNAKNSLYLQMNSLRAEDTAIYYCARATYKRELRYYYGMDVWGQGTMVTVSSGGGGSGGGGSGGGGSEIVMTQSPGTVSLSPGERATLSCRASQSVSSSFLAWYQQKPGQAPRLLIYGASSRATGIPDRFSGSGSGTDFTLTISRLEPEDSAVYYCQQYHSSPSWTFGQGTRLEIK

SEQ ID NO: 1118 - DNA, 744 bp, synthetic construct
  misc_feature 1..744: note = source = /note="Description of Artificial Sequence: Synthetic polynucleotide"
  source 1..744: mol_type = other DNA
caagtgcagctcgtggaatcgggtggcggactggtgcagccggggggctcacttagactgtcctgcgcggccagcggattcactttctcctcctacgccatgtcctgggtcagacaggcccctggaaagggcctggaatgggtgtccgcaatcagcggcagcggcggctcgacctattacgcggattcagtgaagggcagattcaccatttcccgggacaacgccaagaactccttgtaccttcaaatgaactccctccgcgcggaagataccgcaatctactactgcgctcgggccacttacaagagggaactgcgctactactacgggatggacgtctggggccagggaaccatggtcaccgtgtccagcggaggaggaggatcgggaggaggcggtagcgggggtggagggtcggagatcgtgatgacccagtcccccggcactgtgtcgctgtcccccggcgaacgggccaccctgtcatgtcgggccagccagtcagtgtcgtcaagcttcctcgcctggtaccagcagaaaccgggacaagctccccgcctgctgatctacggagccagcagccgggccaccggtattcctgaccggttctccggttcggggtccgggaccgactttactctgactatctctcgcctcgagccagaggactccgccgtgtattactgccagcagtaccactcctccccgtcctggacgttcggacagggcacaaggctggagattaag

SEQ ID NO: 1119 - protein, 124 aa, synthetic construct
  REGION 1..124: note = source = /note="Description of Artificial Sequence: Synthetic polypeptide"
QVQLVESGGGLVQPGGSLRLSCAASGFTFSSYAMSWVRQAPGKGLEWVSAISGSGGSTYYADSVKGRFTISRDNAKNSLYLQMNSLRAEDTAIYYCARATYKRELRYYYGMDVWGQGTMVTVSS

SEQ ID NO: 1120 - protein, 109 aa, synthetic construct
  REGION 1..109: note = source = /note="Description of Artificial Sequence: Synthetic polypeptide"
EIVMTQSPGTVSLSPGERATLSCRASQSVSSSFLAWYQQKPGQAPRLLIYGASSRATGIPDRFSGSGSGTDFTLTISRLEPEDSAVYYCQQYHSSPSWTFGQGTRLEIK

SEQ ID NO: 1121 - protein, 492 aa, synthetic construct
  REGION 1..492: note = source = /note="Description of Artificial Sequence: Synthetic polypeptide"
MALPVTALLLPLALLLHAARPQVQLVESGGGLVQPGGSLRLSCAASGFTFSSYAMSWVRQAPGKGLEWVSAISGSGGSTYYADSVKGRFTISRDNAKNSLYLQMNSLRAEDTAIYYCARATYKRELRYYYGMDVWGQGTMVTVSSGGGGSGGGGSGGGGSEIVMTQSPGTVSLSPGERATLSCRASQSVSSSFLAWYQQKPGQAPRLLIYGASSRATGIPDRFSGSGSGTDFTLTISRLEPEDSAVYYCQQYHSSPSWTFGQGTRLEIKTTTPAPRPPTPAPTIASQPLSLRPEACRPAAGGAVHTRGLDFACDIYIWAPLAGTCGVLLLSLVITLYCKRGRKKLLYIFKQPFMRPVQTTQEEDGCSCRFPEEEEGGCELRVKFSRSADAPAYKQGQNQLYNELNLGRREEYDVLDKRRGRDPEMGGKPRRKNPQEGLYNELQKDKMAEAYSEIGMKGERRRGKGHDGLYQGLSTATKDTYDALHMQALPPR

SEQ ID NO: 1122 - DNA, 1476 bp, synthetic construct
  misc_feature 1..1476: note = source = /note="Description of Artificial Sequence: Synthetic polynucleotide"
  source 1..1476: mol_type = other DNA
atggccctccctgtcaccgccctgctgcttccgctggctcttctgctccacgccgctcggccccaagtgcagctcgtggaatcgggtggcggactggtgcagccggggggctcacttagactgtcctgcgcggccagcggattcactttctcctcctacgccatgtcctgggtcagacaggcccctggaaagggcctggaatgggtgtccgcaatcagcggcagcggcggctcgacctattacgcggattcagtgaagggcagattcaccatttcccgggacaacgccaagaactccttgtaccttcaaatgaactccctccgcgcggaagataccgcaatctactactgcgctcgggccacttacaagagggaactgcgctactactacgggatggacgtctggggccagggaaccatggtcaccgtgtccagcggaggaggaggatcgggaggaggcggtagcgggggtggagggtcggagatcgtgatgacccagtcccccggcactgtgtcgctgtcccccggcgaacgggccaccctgtcatgtcgggccagccagtcagtgtcgtcaagcttcctcgcctggtaccagcagaaaccgggacaagctccccgcctgctgatctacggagccagcagccgggccaccggtattcctgaccggttctccggttcggggtccgggaccgactttactctgactatctctcgcctcgagccagaggactccgccgtgtattactgccagcagtaccactcctccccgtcctggacgttcggacagggcacaaggctggagattaagaccactaccccagcaccgaggccacccaccccggctcctaccatcgcctcccagcctctgtccctgcgtccggaggcatgtagacccgcagctggtggggccgtgcatacccggggtcttgacttcgcctgcgatatctacatttgggcccctctggctggtacttgcggggtcctgctgctttcactcgtgatcactctttactgtaagcgcggtcggaagaagctgctgtacatctttaagcaacccttcatgaggcctgtgcagactactcaagaggaggacggctgttcatgccggttcccagaggaggaggaaggcggctgcgaactgcgcgtgaaattcagccgcagcgcagatgctccagcctacaagcaggggcagaaccagctctacaacgaactcaatcttggtcggagagaggagtacgacgtgctggacaagcggagaggacgggacccagaaatgggcgggaagccgcgcagaaagaatccccaagagggcctgtacaacgagctccaaaaggataagatggcagaagcctatagcgagattggtatgaaaggggaacgcagaagaggcaaaggccacgacggactgtaccagggactcagcaccgccaccaaggacacctatgacgctcttcacatgcaggccctgccgcctcgg

SEQ ID NO: 1123 - protein, 248 aa, synthetic construct
  REGION 1..248: note = source = /note="Description of Artificial Sequence: Synthetic polypeptide"
EVQLVETGGGLVQPGGSLRLSCAASGFTFSSYAMSWVRQAPGKGLEWVSAISGSGGSTYYADSVKGRFTISRDNSKNTLYLQMNTLKAEDTAVYYCARATYKRELRYYYGMDVWGQGTTVTVSSGGGGSGGGGSGGGGSEIVLTQSPSTLSLSPGESATLSCRASQSVSTTFLAWYQQKPGQAPRLLIYGSSNRATGIPDRFSGSGSGTDFTLTIRRLEPEDFAVYYCQQYHSSPSWTFGQGTKVEIK

SEQ ID NO: 1124 - DNA, 744 bp, synthetic construct
  misc_feature 1..744: note = source = /note="Description of Artificial Sequence: Synthetic polynucleotide"
  source 1..744: mol_type = other DNA
gaggtgcagcttgtggaaaccggtggcggactggtgcagcccggaggaagcctcaggctgtcctgcgccgcgtccggcttcaccttctcctcgtacgccatgtcctgggtccgccaggcccccggaaagggcctggaatgggtgtccgccatctctggaagcggaggttccacgtactacgcggacagcgtcaagggaaggttcacaatctcccgcgataattcgaagaacactctgtaccttcaaatgaacaccctgaaggccgaggacactgctgtgtactactgcgcacgggccacctacaagagagagctccggtactactacggaatggacgtctggggccagggaactactgtgaccgtgtcctcgggagggggtggctccggggggggcggctccggcggaggcggttccgagattgtgctgacccagtcaccttcaactctgtcgctgtccccgggagagagcgctactctgagctgccgggccagccagtccgtgtccaccaccttcctcgcctggtatcagcagaagccggggcaggcaccacggctcttgatctacgggtcaagcaacagagcgaccggaattcctgaccgcttctcggggagcggttcaggcaccgacttcaccctgactatccggcgcctggaacccgaagatttcgccgtgtattactgtcaacagtaccactcctcgccgtcctggacctttggccaaggaaccaaagtggaaatcaag

SEQ ID NO: 1125 - protein, 124 aa, synthetic construct
  REGION 1..124: note = source = /note="Description of Artificial Sequence: Synthetic polypeptide"
EVQLVETGGGLVQPGGSLRLSCAASGFTFSSYAMSWVRQAPGKGLEWVSAISGSGGSTYYADSVKGRFTISRDNSKNTLYLQMNTLKAEDTAVYYCARATYKRELRYYYGMDVWGQGTTVTVSS

SEQ ID NO: 1126 - protein, 109 aa, synthetic construct
  REGION 1..109: note = source = /note="Description of Artificial Sequence: Synthetic polypeptide"
EIVLTQSPSTLSLSPGESATLSCRASQSVSTTFLAWYQQKPGQAPRLLIYGSSNRATGIPDRFSGSGSGTDFTLTIRRLEPEDFAVYYCQQYHSSPSWTFGQGTKVEIK

SEQ ID NO: 1127 - protein, 492 aa, synthetic construct
  REGION 1..492: note = source = /note="Description of Artificial Sequence: Synthetic polypeptide"
MALPVTALLLPLALLLHAARPEVQLVETGGGLVQPGGSLRLSCAASGFTFSSYAMSWVRQAPGKGLEWVSAISGSGGSTYYADSVKGRFTISRDNSKNTLYLQMNTLKAEDTAVYYCARATYKRELRYYYGMDVWGQGTTVTVSSGGGGSGGGGSGGGGSEIVLTQSPSTLSLSPGESATLSCRASQSVSTTFLAWYQQKPGQAPRLLIYGSSNRATGIPDRFSGSGSGTDFTLTIRRLEPEDFAVYYCQQYHSSPSWTFGQGTKVEIKTTTPAPRPPTPAPTIASQPLSLRPEACRPAAGGAVHTRGLDFACDIYIWAPLAGTCGVLLLSLVITLYCKRGRKKLLYIFKQPFMRPVQTTQEEDGCSCRFPEEEEGGCELRVKFSRSADAPAYKQGQNQLYNELNLGRREEYDVLDKRRGRDPEMGGKPRRKNPQEGLYNELQKDKMAEAYSEIGMKGERRRGKGHDGLYQGLSTATKDTYDALHMQALPPR

SEQ ID NO: 1128 - DNA, 1476 bp, synthetic construct
  misc_feature 1..1476: note = source = /note="Description of Artificial Sequence: Synthetic polynucleotide"
  source 1..1476: mol_type = other DNA
atggccctccctgtcaccgccctgctgcttccgctggctcttctgctccacgccgctcggcccgaggtgcagcttgtggaaaccggtggcggactggtgcagcccggaggaagcctcaggctgtcctgcgccgcgtccggcttcaccttctcctcgtacgccatgtcctgggtccgccaggcccccggaaagggcctggaatgggtgtccgccatctctggaagcggaggttccacgtactacgcggacagcgtcaagggaaggttcacaatctcccgcgataattcgaagaacactctgtaccttcaaatgaacaccctgaaggccgaggacactgctgtgtactactgcgcacgggccacctacaagagagagctccggtactactacggaatggacgtctggggccagggaactactgtgaccgtgtcctcgggagggggtggctccggggggggcggctccggcggaggcggttccgagattgtgctgacccagtcaccttcaactctgtcgctgtccccgggagagagcgctactctgagctgccgggccagccagtccgtgtccaccaccttcctcgcctggtatcagcagaagccggggcaggcaccacggctcttgatctacgggtcaagcaacagagcgaccggaattcctgaccgcttctcggggagcggttcaggcaccgacttcaccctgactatccggcgcctggaacccgaagatttcgccgtgtattactgtcaacagtaccactcctcgccgtcctggacctttggccaaggaaccaaagtggaaatcaagaccactaccccagcaccgaggccacccaccccggctcctaccatcgcctcccagcctctgtccctgcgtccggaggcatgtagacccgcagctggtggggccgtgcatacccggggtcttgacttcgcctgcgatatctacatttgggcccctctggctggtacttgcggggtcctgctgctttcactcgtgatcactctttactgtaagcgcggtcggaagaagctgctgtacatctttaagcaacccttcatgaggcctgtgcagactactcaagaggaggacggctgttcatgccggttcccagaggaggaggaaggcggctgcgaactgcgcgtgaaattcagccgcagcgcagatgctccagcctacaagcaggggcagaaccagctctacaacgaactcaatcttggtcggagagaggagtacgacgtgctggacaagcggagaggacgggacccagaaatgggcgggaagccgcgcagaaagaatccccaagagggcctgtacaacgagctccaaaaggataagatggcagaagcctatagcgagattggtatgaaaggggaacgcagaagaggcaaaggccacgacggactgtaccagggactcagcaccgccaccaaggacacctatgacgctcttcacatgcaggccctgccgcctcgg

SEQ ID NO: 1129 - protein, 239 aa, synthetic construct
  REGION 1..239: note = source = /note="Description of Artificial Sequence: Synthetic polypeptide"
EVQLVETGGGLVQPGRSLRLSCAASGFTFDDYAMHWVRQAPGKGLEWVSGISWNSGSIGYADSVKGRFTISRDNAKNSLYLQMNSLRDEDTAVYYCARVGKAVPDVWGQGTTVTVSSGGGGSGGGGSGGGGSDIVMTQTPSSLSASVGDRVTITCRASQSISSYLNWYQQKPGKAPKLLIYAASSLQSGVPSRFSGSGSGTDFTLTISSLQPEDFATYYCQQSYSTPYSFGQGTRLEIK

SEQ ID NO: 1130 - DNA, 717 bp, synthetic construct
  misc_feature 1..717: note = source = /note="Description of Artificial Sequence: Synthetic polynucleotide"
  source 1..717: mol_type = other DNA
gaagtgcagctcgtggaaactggaggtggactcgtgcagcctggacggtcgctgcggctgagctgcgctgcatccggcttcaccttcgacgattatgccatgcactgggtcagacaggcgccagggaagggacttgagtgggtgtccggtatcagctggaatagcggctcaatcggatacgcggactccgtgaagggaaggttcaccatttcccgcgacaacgccaagaactccctgtacttgcaaatgaacagcctccgggatgaggacactgccgtgtactactgcgcccgcgtcggaaaagctgtgcccgacgtctggggccagggaaccactgtgaccgtgtccagcggcgggggtggatcgggcggtggagggtccggtggagggggctcagatattgtgatgacccagaccccctcgtccctgtccgcctcggtcggcgaccgcgtgactatcacatgtagagcctcgcagagcatctccagctacctgaactggtatcagcagaagccggggaaggccccgaagctcctgatctacgcggcatcatcactgcaatcgggagtgccgagccggttttccgggtccggctccggcaccgacttcacgctgaccatttcttccctgcaacccgaggacttcgccacttactactgccagcagtcctactccaccccttactccttcggccaaggaaccaggctggaaatcaag

SEQ ID NO: 1131 - protein, 117 aa, synthetic construct
  REGION 1..117: note = source = /note="Description of Artificial Sequence: Synthetic polypeptide"
EVQLVETGGGLVQPGRSLRLSCAASGFTFDDYAMHWVRQAPGKGLEWVSGISWNSGSIGYADSVKGRFTISRDNAKNSLYLQMNSLRDEDTAVYYCARVGKAVPDVWGQGTTVTVSS

SEQ ID NO: 1132 - protein, 107 aa, synthetic construct
  REGION 1..107: note = source = /note="Description of Artificial Sequence: Synthetic polypeptide"
DIVMTQTPSSLSASVGDRVTITCRASQSISSYLNWYQQKPGKAPKLLIYAASSLQSGVPSRFSGSGSGTDFTLTISSLQPEDFATYYCQQSYSTPYSFGQGTRLEIK

SEQ ID NO: 1133 - protein, 483 aa, synthetic construct
  REGION 1..483: note = source = /note="Description of Artificial Sequence: Synthetic polypeptide"
MALPVTALLLPLALLLHAARPEVQLVETGGGLVQPGRSLRLSCAASGFTFDDYAMHWVRQAPGKGLEWVSGISWNSGSIGYADSVKGRFTISRDNAKNSLYLQMNSLRDEDTAVYYCARVGKAVPDVWGQGTTVTVSSGGGGSGGGGSGGGGSDIVMTQTPSSLSASVGDRVTITCRASQSISSYLNWYQQKPGKAPKLLIYAASSLQSGVPSRFSGSGSGTDFTLTISSLQPEDFATYYCQQSYSTPYSFGQGTRLEIKTTTPAPRPPTPAPTIASQPLSLRPEACRPAAGGAVHTRGLDFACDIYIWAPLAGTCGVLLLSLVITLYCKRGRKKLLYIFKQPFMRPVQTTQEEDGCSCRFPEEEEGGCELRVKFSRSADAPAYKQGQNQLYNELNLGRREEYDVLDKRRGRDPEMGGKPRRKNPQEGLYNELQKDKMAEAYSEIGMKGERRRGKGHDGLYQGLSTATKDTYDALHMQALPPR

SEQ ID NO: 1134 - DNA, 1449 bp, synthetic construct
  misc_feature 1..1449: note = source = /note="Description of Artificial Sequence: Synthetic polynucleotide"
  source 1..1449: mol_type = other DNA
atggccctccctgtcaccgccctgctgcttccgctggctcttctgctccacgccgctcggcccgaagtgcagctcgtggaaactggaggtggactcgtgcagcctggacggtcgctgcggctgagctgcgctgcatccggcttcaccttcgacgattatgccatgcactgggtcagacaggcgccagggaagggacttgagtgggtgtccggtatcagctggaatagcggctcaatcggatacgcggactccgtgaagggaaggttcaccatttcccgcgacaacgccaagaactccctgtacttgcaaatgaacagcctccgggatgaggacactgccgtgtactactgcgcccgcgtcggaaaagctgtgcccgacgtctggggccagggaaccactgtgaccgtgtccagcggcgggggtggatcgggcggtggagggtccggtggagggggctcagatattgtgatgacccagaccccctcgtccctgtccgcctcggtcggcgaccgcgtgactatcacatgtagagcctcgcagagcatctccagctacctgaactggtatcagcagaagccggggaaggccccgaagctcctgatctacgcggcatcatcactgcaatcgggagtgccgagccggttttccgggtccggctccggcaccgacttcacgctgaccatttcttccctgcaacccgaggacttcgccacttactactgccagcagtcctactccaccccttactccttcggccaaggaaccaggctggaaatcaagaccactaccccagcaccgaggccacccaccccggctcctaccatcgcctcccagcctctgtccctgcgtccggaggcatgtagacccgcagctggtggggccgtgcatacccggggtcttgacttcgcctgcgatatctacatttgggcccctctggctggtacttgcggggtcctgctgctttcactcgtgatcactctttactgtaagcgcggtcggaagaagctgctgtacatctttaagcaacccttcatgaggcctgtgcagactactcaagaggaggacggctgttcatgccggttcccagaggaggaggaaggcggctgcgaactgcgcgtgaaattcagccgcagcgcagatgctccagcctacaagcaggggcagaaccagctctacaacgaactcaatcttggtcggagagaggagtacgacgtgctggacaagcggagaggacgggacccagaaatgggcgggaagccgcgcagaaagaatccccaagagggcctgtacaacgagctccaaaaggataagatggcagaagcctatagcgagattggtatgaaaggggaacgcagaagaggcaaaggccacgacggactgtaccagggactcagcaccgccaccaaggacacctatgacgctcttcacatgcaggccctgccgcctcgg

SEQ ID NO: 1135 - protein, 246 aa, synthetic construct
  REGION 1..246: note = source = /note="Description of Artificial Sequence: Synthetic polypeptide"
EVQLVESGGGLVQPGRSLRLSCTASGFTFDDYAMHWVRQRPGKGLEWVASINWKGNSLAYGDSVKGRFAISRDNAKNTVFLQMNSLRTEDTAVYYCASHQGVAYYNYAMDVWGRGTLVTVSSGGGGSGGGGSGGGGSEIVLTQSPGTLSLSPGERATLSCRATQSIGSSFLAWYQQRPGQAPRLLIYGASQRATGIPDRFSGRGSGTDFTLTISRVEPEDSAVYYCQHYESSPSWTFGQGTKVEIK

SEQ ID NO: 1136 - DNA, 738 bp, synthetic construct
  misc_feature 1..738: note = source = /note="Description of Artificial Sequence: Synthetic polynucleotide"
  source 1..738: mol_type = other DNA
gaagtgcagctcgtggagagcgggggaggattggtgcagcccggaaggtccctgcggctctcctgcactgcgtctggcttcaccttcgacgactacgcgatgcactgggtcagacagcgcccgggaaagggcctggaatgggtcgcctcaatcaactggaagggaaactccctggcctatggcgacagcgtgaagggccgcttcgccatttcgcgcgacaacgccaagaacaccgtgtttctgcaaatgaattccctgcggaccgaggataccgctgtgtactactgcgccagccaccagggcgtggcatactataactacgccatggacgtgtggggaagagggacgctcgtcaccgtgtcctccgggggcggtggatcgggtggaggaggaagcggtggcgggggcagcgaaatcgtgctgactcagagcccgggaactctttcactgtccccgggagaacgggccactctctcgtgccgggccacccagtccatcggctcctccttccttgcctggtaccagcagaggccaggacaggcgccccgcctgctgatctacggtgcttcccaacgcgccactggcattcctgaccggttcagcggcagagggtcgggaaccgatttcacactgaccatttcccgggtggagcccgaagattcggcagtctactactgtcagcattacgagtcctccccttcatggaccttcggtcaagggaccaaagtggagatcaag

SEQ ID NO: 1137 - protein, 122 aa, synthetic construct
  REGION 1..122: note = source = /note="Description of Artificial Sequence: Synthetic polypeptide"
EVQLVESGGGLVQPGRSLRLSCTASGFTFDDYAMHWVRQRPGKGLEWVASINWKGNSLAYGDSVKGRFAISRDNAKNTVFLQMNSLRTEDTAVYYCASHQGVAYYNYAMDVWGRGTLVTVSS

SEQ ID NO: 1138 - protein, 109 aa, synthetic construct
  REGION 1..109: note = source = /note="Description of Artificial Sequence: Synthetic polypeptide"
EIVLTQSPGTLSLSPGERATLSCRATQSIGSSFLAWYQQRPGQAPRLLIYGASQRATGIPDRFSGRGSGTDFTLTISRVEPEDSAVYYCQHYESSPSWTFGQGTKVEIK

SEQ ID NO: 1139 - protein, 490 aa, synthetic construct
  REGION 1..490: note = source = /note="Description of Artificial Sequence: Synthetic polypeptide"
MALPVTALLLPLALLLHAARPEVQLVESGGGLVQPGRSLRLSCTASGFTFDDYAMHWVRQRPGKGLEWVASINWKGNSLAYGDSVKGRFAISRDNAKNTVFLQMNSLRTEDTAVYYCASHQGVAYYNYAMDVWGRGTLVTVSSGGGGSGGGGSGGGGSEIVLTQSPGTLSLSPGERATLSCRATQSIGSSFLAWYQQRPGQAPRLLIYGASQRATGIPDRFSGRGSGTDFTLTISRVEPEDSAVYYCQHYESSPSWTFGQGTKVEIKTTTPAPRPPTPAPTIASQPLSLRPEACRPAAGGAVHTRGLDFACDIYIWAPLAGTCGVLLLSLVITLYCKRGRKKLLYIFKQPFMRPVQTTQEEDGCSCRFPEEEEGGCELRVKFSRSADAPAYKQGQNQLYNELNLGRREEYDVLDKRRGRDPEMGGKPRRKNPQEGLYNELQKDKMAEAYSEIGMKGERRRGKGHDGLYQGLSTATKDTYDALHMQALPPR

SEQ ID NO: 1140 - DNA, 1470 bp, synthetic construct
  misc_feature 1..1470: note = source = /note="Description of Artificial Sequence: Synthetic polynucleotide"
  source 1..1470: mol_type = other DNA
atggccctccctgtcaccgccctgctgcttccgctggctcttctgctccacgccgctcggcccgaagtgcagctcgtggagagcgggggaggattggtgcagcccggaaggtccctgcggctctcctgcactgcgtctggcttcaccttcgacgactacgcgatgcactgggtcagacagcgcccgggaaagggcctggaatgggtcgcctcaatcaactggaagggaaactccctggcctatggcgacagcgtgaagggccgcttcgccatttcgcgcgacaacgccaagaacaccgtgtttctgcaaatgaattccctgcggaccgaggataccgctgtgtactactgcgccagccaccagggcgtggcatactataactacgccatggacgtgtggggaagagggacgctcgtcaccgtgtcctccgggggcggtggatcgggtggaggaggaagcggtggcgggggcagcgaaatcgtgctgactcagagcccgggaactctttcactgtccccgggagaacgggccactctctcgtgccgggccacccagtccatcggctcctccttccttgcctggtaccagcagaggccaggacaggcgccccgcctgctgatctacggtgcttcccaacgcgccactggcattcctgaccggttcagcggcagagggtcgggaaccgatttcacactgaccatttcccgggtggagcccgaagattcggcagtctactactgtcagcattacgagtcctccccttcatggaccttcggtcaagggaccaaagtggagatcaagaccactaccccagcaccgaggccacccaccccggctcctaccatcgcctcccagcctctgtccctgcgtccggaggcatgtagacccgcagctggtggggccgtgcatacccggggtcttgacttcgcctgcgatatctacatttgggcccctctggctggtacttgcggggtcctgctgctttcactcgtgatcactctttactgtaagcgcggtcggaagaagctgctgtacatctttaagcaacccttcatgaggcctgtgcagactactcaagaggaggacggctgttcatgccggttcccagaggaggaggaaggcggctgcgaactgcgcgtgaaattcagccgcagcgcagatgctccagcctacaagcaggggcagaaccagctctacaacgaactcaatcttggtcggagagaggagtacgacgtgctggacaagcggagaggacgggacccagaaatgggcgggaagccgcgcagaaagaatccccaagagggcctgtacaacgagctccaaaaggataagatggcagaagcctatagcgagattggtatgaaaggggaacgcagaagaggcaaaggccacgacggactgtaccagggactcagcaccgccaccaaggacacctatgacgctcttcacatgcaggccctgccgcctcgg

SEQ ID NO: 1141 - protein, 241 aa, synthetic construct
  REGION 1..241: note = source = /note="Description of Artificial Sequence: Synthetic polypeptide"
EVQLVESGGGLVQPGGSLRLSCAASGFTFSSYAMSWVRQAPGKGLEWVSAISGSGGSTYYADSVKGRFTISRDNSKNTLYLQMNSLRAEDTAVYYCAKVVRDGMDVWGQGTTVTVSSGGGGSGGGGSGGGGSEIVLTQSPATLSLSPGERATLSCRASQSVSSSYLAWYQQKPGQAPRLLIYGASSRATGIPDRFSGNGSGTDFTLTISRLEPEDFAVYYCQQYGSPPRFTFGPGTKVDIK

SEQ ID NO: 1142 - DNA, 723 bp, synthetic construct
  misc_feature 1..723: note = source = /note="Description of Artificial Sequence: Synthetic polynucleotide"
  source 1..723: mol_type = other DNA
gaggtgcagttggtcgaaagcgggggcgggcttgtgcagcctggcggatcactgcggctgtcctgcgcggcatcaggcttcacgttttcttcctacgccatgtcctgggtgcgccaggcccctggaaagggactggaatgggtgtccgcgatttcggggtccggcgggagcacctactacgccgattccgtgaagggccgcttcactatctcgcgggacaactccaagaacaccctctacctccaaatgaatagcctgcgggccgaggataccgccgtctactattgcgctaaggtcgtgcgcgacggaatggacgtgtggggacagggtaccaccgtgacagtgtcctcggggggaggcggtagcggcggaggaggaagcggtggtggaggttccgagattgtgctgactcaatcacccgcgaccctgagcctgtcccccggcgaaagggccactctgtcctgtcgggccagccaatcagtctcctcctcgtacctggcctggtaccagcagaagccaggacaggctccgagactccttatctatggcgcatcctcccgcgccaccggaatcccggataggttctcgggaaacggatcggggaccgacttcactctcaccatctcccggctggaaccggaggacttcgccgtgtactactgccagcagtacggcagcccgcctagattcactttcggccccggcaccaaagtggacatcaag

SEQ ID NO: 1143 - protein, 117 aa, synthetic construct
  REGION 1..117: note = source = /note="Description of Artificial Sequence: Synthetic polypeptide"
EVQLVESGGGLVQPGGSLRLSCAASGFTFSSYAMSWVRQAPGKGLEWVSAISGSGGSTYYADSVKGRFTISRDNSKNTLYLQMNSLRAEDTAVYYCAKVVRDGMDVWGQGTTVTVSS

SEQ ID NO: 1144 - protein, 109 aa, synthetic construct
  REGION 1..109: note = source = /note="Description of Artificial Sequence: Synthetic polypeptide"
EIVLTQSPATLSLSPGERATLSCRASQSVSSSYLAWYQQKPGQAPRLLIYGASSRATGIPDRFSGNGSGTDFTLTISRLEPEDFAVYYCQQYGSPPRFTFGPGTKVDIK

SEQ ID NO: 1145 - protein, 485 aa, synthetic construct
  REGION 1..485: note = source = /note="Description of Artificial Sequence: Synthetic polypeptide"
MALPVTALLLPLALLLHAARPEVQLVESGGGLVQPGGSLRLSCAASGFTFSSYAMSWVRQAPGKGLEWVSAISGSGGSTYYADSVKGRFTISRDNSKNTLYLQMNSLRAEDTAVYYCAKVVRDGMDVWGQGTTVTVSSGGGGSGGGGSGGGGSEIVLTQSPATLSLSPGERATLSCRASQSVSSSYLAWYQQKPGQAPRLLIYGASSRATGIPDRFSGNGSGTDFTLTISRLEPEDFAVYYCQQYGSPPRFTFGPGTKVDIKTTTPAPRPPTPAPTIASQPLSLRPEACRPAAGGAVHTRGLDFACDIYIWAPLAGTCGVLLLSLVITLYCKRGRKKLLYIFKQPFMRPVQTTQEEDGCSCRFPEEEEGGCELRVKFSRSADAPAYKQGQNQLYNELNLGRREEYDVLDKRRGRDPEMGGKPRRKNPQEGLYNELQKDKMAEAYSEIGMKGERRRGKGHDGLYQGLSTATKDTYDALHMQALPPR

SEQ ID NO: 1146 - DNA, 1455 bp, synthetic construct
  misc_feature 1..1455: note = source = /note="Description of Artificial Sequence: Synthetic polynucleotide"
  source 1..1455: mol_type = other DNA
atggccctccctgtcaccgccctgctgcttccgctggctcttctgctccacgccgctcggcccgaggtgcagttggtcgaaagcgggggcgggcttgtgcagcctggcggatcactgcggctgtcctgcgcggcatcaggcttcacgttttcttcctacgccatgtcctgggtgcgccaggcccctggaaagggactggaatgggtgtccgcgatttcggggtccggcgggagcacctactacgccgattccgtgaagggccgcttcactatctcgcgggacaactccaagaacaccctctacctccaaatgaatagcctgcgggccgaggataccgccgtctactattgcgctaaggtcgtgcgcgacggaatggacgtgtggggacagggtaccaccgtgacagtgtcctcggggggaggcggtagcggcggaggaggaagcggtggtggaggttccgagattgtgctgactcaatcacccgcgaccctgagcctgtcccccggcgaaagggccactctgtcctgtcgggccagccaatcagtctcctcctcgtacctggcctggtaccagcagaagccaggacaggctccgagactccttatctatggcgcatcctcccgcgccaccggaatcccggataggttctcgggaaacggatcggggaccgacttcactctcaccatctcccggctggaaccggaggacttcgccgtgtactactgccagcagtacggcagcccgcctagattcactttcggccccggcaccaaagtggacatcaagaccactaccccagcaccgaggccacccaccccggctcctaccatcgcctcccagcctctgtccctgcgtccggaggcatgtagacccgcagctggtggggccgtgcatacccggggtcttgacttcgcctgcgatatctacatttgggcccctctggctggtacttgcggggtcctgctgctttcactcgtgatcactctttactgtaagcgcggtcggaagaagctgctgtacatctttaagcaacccttcatgaggcctgtgcagactactcaagaggaggacggctgttcatgccggttcccagaggaggaggaaggcggctgcgaactgcgcgtgaaattcagccgcagcgcagatgctccagcctacaagcaggggcagaaccagctctacaacgaactcaatcttggtcggagagaggagtacgacgtgctggacaagcggagaggacgggacccagaaatgggcgggaagccgcgcagaaagaatccccaagagggcctgtacaacgagctccaaaaggataagatggcagaagcctatagcgagattggtatgaaaggggaacgcagaagaggcaaaggccacgacggactgtaccagggactcagcaccgccaccaaggacacctatgacgctcttcacatgcaggccctgccgcctcgg

SEQ ID NO: 1147 - protein, 242 aa, synthetic construct
  REGION 1..242: note = source = /note="Description of Artificial Sequence: Synthetic polypeptide"
EVQLLESGGGLVQPGGSLRLSCAASGFTFSSYAMSWVRQAPGKGLEWVSAISGSGGSTYYADSVKGRFTISRDNSKNTLYLQMNSLRAEDTAVYYCAKIPQTGTFDYWGQGTLVTVSSGGGGSGGGGSGGGGSEIVLTQSPGTLSLSPGERATLSCRASQSVSSSYLAWYQQRPGQAPRLLIYGASSRATGIPDRFSGSGSGTDFTLTISRLEPEDFAVYYCQHYGSSPSWTFGQGTRLEIK

SEQ ID NO: 1148 - DNA, 726 bp, synthetic construct
  misc_feature 1..726: note = source = /note="Description of Artificial Sequence: Synthetic polynucleotide"
  source 1..726: mol_type = other DNA
gaagtgcagctgctggagtccggcggtggattggtgcaaccggggggatcgctcagactgtcctgtgcggcgtcaggcttcaccttctcgagctacgccatgtcatgggtcagacaggcccctggaaagggtctggaatgggtgtccgccatttccgggagcgggggatctacatactacgccgatagcgtgaagggccgcttcaccatttcccgggacaactccaagaacactctctatctgcaaatgaactccctccgcgctgaggacactgccgtgtactactgcgccaaaatccctcagaccggcaccttcgactactggggacaggggactctggtcaccgtcagcagcggtggcggaggttcggggggaggaggaagcggcggcggagggtccgagattgtgctgacccagtcacccggcactttgtccctgtcgcctggagaaagggccaccctttcctgccgggcatcccaatccgtgtcctcctcgtacctggcctggtaccagcagaggcccggacaggccccacggcttctgatctacggagcaagcagccgcgcgaccggtatcccggaccggttttcgggctcgggctcaggaactgacttcaccctcaccatctcccgcctggaacccgaagatttcgctgtgtattactgccagcactacggcagctccccgtcctggacgttcggccagggaactcggctggagatcaag

SEQ ID NO: 1149 - protein, 118 aa, synthetic construct
  REGION 1..118: note = source = /note="Description of Artificial Sequence: Synthetic polypeptide"
EVQLLESGGGLVQPGGSLRLSCAASGFTFSSYAMSWVRQAPGKGLEWVSAISGSGGSTYYADSVKGRFTISRDNSKNTLYLQMNSLRAEDTAVYYCAKIPQTGTFDYWGQGTLVTVSS

SEQ ID NO: 1150 - protein, 109 aa, synthetic construct
  REGION 1..109: note = source = /note="Description of Artificial Sequence: Synthetic polypeptide"
EIVLTQSPGTLSLSPGERATLSCRASQSVSSSYLAWYQQRPGQAPRLLIYGASSRATGIPDRFSGSGSGTDFTLTISRLEPEDFAVYYCQHYGSSPSWTFGQGTRLEIK

SEQ ID NO: 1151 - protein, 486 aa, synthetic construct
  REGION 1..486: note = source = /note="Description of Artificial Sequence: Synthetic polypeptide"
MALPVTALLLPLALLLHAARPEVQLLESGGGLVQPGGSLRLSCAASGFTFSSYAMSWVRQAPGKGLEWVSAISGSGGSTYYADSVKGRFTISRDNSKNTLYLQMNSLRAEDTAVYYCAKIPQTGTFDYWGQGTLVTVSSGGGGSGGGGSGGGGSEIVLTQSPGTLSLSPGERATLSCRASQSVSSSYLAWYQQRPGQAPRLLIYGASSRATGIPDRFSGSGSGTDFTLTISRLEPEDFAVYYCQHYGSSPSWTFGQGTRLEIKTTTPAPRPPTPAPTIASQPLSLRPEACRPAAGGAVHTRGLDFACDIYIWAPLAGTCGVLLLSLVITLYCKRGRKKLLYIFKQPFMRPVQTTQEEDGCSCRFPEEEEGGCELRVKFSRSADAPAYKQGQNQLYNELNLGRREEYDVLDKRRGRDPEMGGKPRRKNPQEGLYNELQKDKMAEAYSEIGMKGERRRGKGHDGLYQGLSTATKDTYDALHMQALPPR

SEQ ID NO: 1152 - DNA, 1458 bp, synthetic construct
  misc_feature 1..1458: note = source = /note="Description of Artificial Sequence: Synthetic polynucleotide"
  source 1..1458: mol_type = other DNA
atggccctccctgtcaccgccctgctgcttccgctggctcttctgctccacgccgctcggcccgaagtgcagctgctggagtccggcggtggattggtgcaaccggggggatcgctcagactgtcctgtgcggcgtcaggcttcaccttctcgagctacgccatgtcatgggtcagacaggcccctggaaagggtctggaatgggtgtccgccatttccgggagcgggggatctacatactacgccgatagcgtgaagggccgcttcaccatttcccgggacaactccaagaacactctctatctgcaaatgaactccctccgcgctgaggacactgccgtgtactactgcgccaaaatccctcagaccggcaccttcgactactggggacaggggactctggtcaccgtcagcagcggtggcggaggttcggggggaggaggaagcggcggcggagggtccgagattgtgctgacccagtcacccggcactttgtccctgtcgcctggagaaagggccaccctttcctgccgggcatcccaatccgtgtcctcctcgtacctggcctggtaccagcagaggcccggacaggccccacggcttctgatctacggagcaagcagccgcgcgaccggtatcccggaccggttttcgggctcgggctcaggaactgacttcaccctcaccatctcccgcctggaacccgaagatttcgctgtgtattactgccagcactacggcagctccccgtcctggacgttcggccagggaactcggctggagatcaagaccactaccccagcaccgaggccacccaccccggctcctaccatcgcctcccagcctctgtccctgcgtccggaggcatgtagacccgcagctggtggggccgtgcatacccggggtcttgacttcgcctgcgatatctacatttgggcccctctggctggtacttgcggggtcctgctgctttcactcgtgatcactctttactgtaagcgcggtcggaagaagctgctgtacatctttaagcaacccttcatgaggcctgtgcagactactcaagaggaggacggctgttcatgccggttcccagaggaggaggaaggcggctgcgaactgcgcgtgaaattcagccgcagcgcagatgctccagcctacaagcaggggcagaaccagctctacaacgaactcaatcttggtcggagagaggagtacgacgtgctggacaagcggagaggacgggacccagaaatgggcgggaagccgcgcagaaagaatccccaagagggcctgtacaacgagctccaaaaggataagatggcagaagcctatagcgagattggtatgaaaggggaacgcagaagaggcaaaggccacgacggactgtaccagggactcagcaccgccaccaaggacacctatgacgctcttcacatgcaggccctgccgcctcgg

SEQ ID NO: 1153 - protein, 248 aa, synthetic construct
  REGION 1..248: note = source = /note="Description of Artificial Sequence: Synthetic polypeptide"
EVQLVETGGGLVQPGGSLRLSCAASGFTFSSYAMSWVRQAPGKGLEWVSAISGSGGSTYYADSVKGRFTMSRENDKNSVFLQMNSLRVEDTGVYYCARANYKRELRYYYGMDVWGQGTMVTVSSGGGGSGGGGSGGGGSEIVMTQSPGTLSLSPGESATLSCRASQRVASNYLAWYQHKPGQAPSLLISGASSRATGVPDRFSGSGSGTDFTLAISRLEPEDSAVYYCQHYDSSPSWTFGQGTKVEIK

SEQ ID NO: 1154 - DNA, 744 bp, synthetic construct
  misc_feature 1..744: note = source = /note="Description of Artificial Sequence: Synthetic polynucleotide"
  source 1..744: mol_type = other DNA
gaagtgcaactggtggaaaccggtggaggactcgtgcagcctggcggcagcctccggctgagctgcgccgcttcgggattcaccttttcctcctacgcgatgtcttgggtcagacaggcccccggaaaggggctggaatgggtgtcagccatctccggctccggcggatcaacgtactacgccgactccgtgaaaggccggttcaccatgtcgcgcgagaatgacaagaactccgtgttcctgcaaatgaactccctgagggtggaggacaccggagtgtactattgtgcgcgcgccaactacaagagagagctgcggtactactacggaatggacgtctggggacagggaactatggtgaccgtgtcatccggtggagggggaagcggcggtggaggcagcgggggcgggggttcagaaattgtcatgacccagtccccgggaactctttccctctcccccggggaatccgcgactttgtcctgccgggccagccagcgcgtggcctcgaactacctcgcatggtaccagcataagccaggccaagccccttccctgctgatttccggggctagcagccgcgccactggcgtgccggataggttctcgggaagcggctcgggtaccgatttcaccctggcaatctcgcggctggaaccggaggattcggccgtgtactactgccagcactatgactcatccccctcctggacattcggacagggcaccaaggtcgagatcaag

SEQ ID NO: 1155 - protein, 124 aa, synthetic construct
  REGION 1..124: note = source = /note="Description of Artificial Sequence: Synthetic polypeptide"
EVQLVETGGGLVQPGGSLRLSCAASGFTFSSYAMSWVRQAPGKGLEWVSAISGSGGSTYYADSVKGRFTMSRENDKNSVFLQMNSLRVEDTGVYYCARANYKRELRYYYGMDVWGQGTMVTVSS

SEQ ID NO: 1156 - protein, 109 aa, synthetic construct
  REGION 1..109: note = source = /note="Description of Artificial Sequence: Synthetic polypeptide"
EIVMTQSPGTLSLSPGESATLSCRASQRVASNYLAWYQHKPGQAPSLLISGASSRATGVPDRFSGSGSGTDFTLAISRLEPEDSAVYYCQHYDSSPSWTFGQGTKVEIK

SEQ ID NO: 1157 - protein, 492 aa, synthetic construct
  REGION 1..492: note = source = /note="Description of Artificial Sequence: Synthetic polypeptide"
MALPVTALLLPLALLLHAARPEVQLVETGGGLVQPGGSLRLSCAASGFTFSSYAMSWVRQAPGKGLEWVSAISGSGGSTYYADSVKGRFTMSRENDKNSVFLQMNSLRVEDTGVYYCARANYKRELRYYYGMDVWGQGTMVTVSSGGGGSGGGGSGGGGSEIVMTQSPGTLSLSPGESATLSCRASQRVASNYLAWYQHKPGQAPSLLISGASSRATGVPDRFSGSGSGTDFTLAISRLEPEDSAVYYCQHYDSSPSWTFGQGTKVEIKTTTPAPRPPTPAPTIASQPLSLRPEACRPAAGGAVHTRGLDFACDIYIWAPLAGTCGVLLLSLVITLYCKRGRKKLLYIFKQPFMRPVQTTQEEDGCSCRFPEEEEGGCELRVKFSRSADAPAYKQGQNQLYNELNLGRREEYDVLDKRRGRDPEMGGKPRRKNPQEGLYNELQKDKMAEAYSEIGMKGERRRGKGHDGLYQGLSTATKDTYDALHMQALPPR

SEQ ID NO: 1158 - DNA, 1476 bp, synthetic construct
  misc_feature 1..1476: note = source = /note="Description of Artificial Sequence: Synthetic polynucleotide"
  source 1..1476: mol_type = other DNA
atggccctccctgtcaccgccctgctgcttccgctggctcttctgctccacgccgctcggcccgaagtgcaactggtggaaaccggtggaggactcgtgcagcctggcggcagcctccggctgagctgcgccgcttcgggattcaccttttcctcctacgcgatgtcttgggtcagacaggcccccggaaaggggctggaatgggtgtcagccatctccggctccggcggatcaacgtactacgccgactccgtgaaaggccggttcaccatgtcgcgcgagaatgacaagaactccgtgttcctgcaaatgaactccctgagggtggaggacaccggagtgtactattgtgcgcgcgccaactacaagagagagctgcggtactactacggaatggacgtctggggacagggaactatggtgaccgtgtcatccggtggagggggaagcggcggtggaggcagcgggggcgggggttcagaaattgtcatgacccagtccccgggaactctttccctctcccccggggaatccgcgactttgtcctgccgggccagccagcgcgtggcctcgaactacctcgcatggtaccagcataagccaggccaagccccttccctgctgatttccggggctagcagccgcgccactggcgtgccggataggttctcgggaagcggctcgggtaccgatttcaccctggcaatctcgcggctggaaccggaggattcggccgtgtactactgccagcactatgactcatccccctcctggacattcggacagggcaccaaggtcgagatcaagaccactaccccagcaccgaggccacccaccccggctcctaccatcgcctcccagcctctgtccctgcgtccggaggcatgtagacccgcagctggtggggccgtgcatacccggggtcttgacttcgcctgcgatatctacatttgggcccctctggctggtacttgcggggtcctgctgctttcactcgtgatcactctttactgtaagcgcggtcggaagaagctgctgtacatctttaagcaacccttcatgaggcctgtgcagactactcaagaggaggacggctgttcatgccggttcccagaggaggaggaaggcggctgcgaactgcgcgtgaaattcagccgcagcgcagatgctccagcctacaagcaggggcagaaccagctctacaacgaactcaatcttggtcggagagaggagtacgacgtgctggacaagcggagaggacgggacccagaaatgggcgggaagccgcgcagaaagaatccccaagagggcctgtacaacgagctccaaaaggataagatggcagaagcctatagcgagattggtatgaaaggggaacgcagaagaggcaaaggccacgacggactgtaccagggactcagcaccgccaccaaggacacctatgacgctcttcacatgcaggccctgccgcctcgg

SEQ ID NO: 1159 - protein, 244 aa, synthetic construct
  REGION 1..244: note = source = /note="Description of Artificial Sequence: Synthetic polypeptide"
EVQLLETGGGLVQPGGSLRLSCAASGFSFSSYAMSWVRQAPGKGLEWVSAISGSGGSTYYADSVKGRFTISRDNSKNTLYLQMNSLRAEDTAVYYCAKALVGATGAFDIWGQGTLVTVSSGGGGSGGGGSGGGGSEIVLTQSPGTLSLSPGERATLSCRASQSLSSNFLAWYQQKPGQAPGLLIYGASNWATGTPDRFSGSGSGTDFTLTITRLEPEDFAVYYCQYYGTSPMYTFGQGTKVEIK

SEQ ID NO: 1160 - DNA, 732 bp, synthetic construct
  misc_feature 1..732: note = source = /note="Description of Artificial Sequence: Synthetic polynucleotide"
  source 1..732: mol_type = other DNA
gaagtgcagctgctcgaaaccggtggagggctggtgcagccagggggctccctgaggctttcatgcgccgctagcggattctccttctcctcttacgccatgtcgtgggtccgccaagcccctggaaaaggcctggaatgggtgtccgcgatttccgggagcggaggttcgacctattacgccgactccgtgaagggccgctttaccatctcccgggataactccaagaacactctgtacctccaaatgaactcgctgagagccgaggacaccgccgtgtattactgcgcgaaggcgctggtcggcgcgactggggcattcgacatctggggacagggaactcttgtgaccgtgtcgagcggaggcggcggctccggcggaggagggagcgggggcggtggttccgaaatcgtgttgactcagtccccgggaaccctgagcttgtcacccggggagcgggccactctctcctgtcgcgcctcccaatcgctctcatccaatttcctggcctggtaccagcagaagcccggacaggccccgggcctgctcatctacggcgcttcaaactgggcaacgggaacccctgatcggttcagcggaagcggatcgggtactgactttaccctgaccatcaccagactggaaccggaggacttcgccgtgtactactgccagtactacggcacctcccccatgtacacattcggacagggtaccaaggtcgagattaag

SEQ ID NO: 1161 - protein, 120 aa, synthetic construct
  REGION 1..120: note = source = /note="Description of Artificial Sequence: Synthetic polypeptide"
EVQLLETGGGLVQPGGSLRLSCAASGFSFSSYAMSWVRQAPGKGLEWVSAISGSGGSTYYADSVKGRFTISRDNSKNTLYLQMNSLRAEDTAVYYCAKALVGATGAFDIWGQGTLVTVSS

SEQ ID NO: 1162 - protein, 109 aa, synthetic construct
  REGION 1..109: note = source = /note="Description of Artificial Sequence: Synthetic polypeptide"
EIVLTQSPGTLSLSPGERATLSCRASQSLSSNFLAWYQQKPGQAPGLLIYGASNWATGTPDRFSGSGSGTDFTLTITRLEPEDFAVYYCQYYGTSPMYTFGQGTKVEIK

SEQ ID NO: 1163 - protein, 488 aa, synthetic construct
  REGION 1..488: note = source = /note="Description of Artificial Sequence: Synthetic polypeptide"
MALPVTALLLPLALLLHAARPEVQLLETGGGLVQPGGSLRLSCAASGFSFSSYAMSWVRQAPGKGLEWVSAISGSGGSTYYADSVKGRFTISRDNSKNTLYLQMNSLRAEDTAVYYCAKALVGATGAFDIWGQGTLVTVSSGGGGSGGGGSGGGGSEIVLTQSPGTLSLSPGERATLSCRASQSLSSNFLAWYQQKPGQAPGLLIYGASNWATGTPDRFSGSGSGTDFTLTITRLEPEDFAVYYCQYYGTSPMYTFGQGTKVEIKTTTPAPRPPTPAPTIASQPLSLRPEACRPAAGGAVHTRGLDFACDIYIWAPLAGTCGVLLLSLVITLYCKRGRKKLLYIFKQPFMRPVQTTQEEDGCSCRFPEEEEGGCELRVKFSRSADAPAYKQGQNQLYNELNLGRREEYDVLDKRRGRDPEMGGKPRRKNPQEGLYNELQKDKMAEAYSEIGMKGERRRGKGHDGLYQGLSTATKDTYDALHMQALPPR

SEQ ID NO: 1164 - DNA, 1464 bp, synthetic construct
  misc_feature 1..1464: note = source = /note="Description of Artificial Sequence: Synthetic polynucleotide"
  source 1..1464: mol_type = other DNA
atggccctccctgtcaccgccctgctgcttccgctggctcttctgctccacgccgctcggcccgaagtgcagctgctcgaaaccggtggagggctggtgcagccagggggctccctgaggctttcatgcgccgctagcggattctccttctcctcttacgccatgtcgtgggtccgccaagcccctggaaaaggcctggaatgggtgtccgcgatttccgggagcggaggttcgacctattacgccgactccgtgaagggccgctttaccatctcccgggataactccaagaacactctgtacctccaaatgaactcgctgagagccgaggacaccgccgtgtattactgcgcgaaggcgctggtcggcgcgactggggcattcgacatctggggacagggaactcttgtgaccgtgtcgagcggaggcggcggctccggcggaggagggagcgggggcggtggttccgaaatcgtgttgactcagtccccgggaaccctgagcttgtcacccggggagcgggccactctctcctgtcgcgcctcccaatcgctctcatccaatttcctggcctggtaccagcagaagcccggacaggccccgggcctgctcatctacggcgcttcaaactgggcaacgggaacccctgatcggttcagcggaagcggatcgggtactgactttaccctgaccatcaccagactggaaccggaggacttcgccgtgtactactgccagtactacggcacctcccccatgtacacattcggacagggtaccaaggtcgagattaagaccactaccccagcaccgaggccacccaccccggctcctaccatcgcctcccagcctctgtccctgcgtccggaggcatgtagacccgcagctggtggggccgtgcatacccggggtcttgacttcgcctgcgatatctacatttgggcccctctggctggtacttgcggggtcctgctgctttcactcgtgatcactctttactgtaagcgcggtcggaagaagctgctgtacatctttaagcaacccttcatgaggcctgtgcagactactcaagaggaggacggctgttcatgccggttcccagaggaggaggaaggcggctgcgaactgcgcgtgaaattcagccgcagcgcagatgctccagcctacaagcaggggcagaaccagctctacaacgaactcaatcttggtcggagagaggagtacgacgtgctggacaagcggagaggacgggacccagaaatgggcgggaagccgcgcagaaagaatccccaagagggcctgtacaacgagctccaaaaggataagatggcagaagcctatagcgagattggtatgaaaggggaacgcagaagaggcaaaggccacgacggactgtaccagggactcagcaccgccaccaaggacacctatgacgctcttcacatgcaggccctgccgcctcgg

SEQ ID NO: 1165 - protein, 244 aa, synthetic construct
  REGION 1..244: note = source = /note="Description of Artificial Sequence: Synthetic polypeptide"
EVQLLESGGGLVQPGGSLRLSCAASGFTFSSYAMSWVRQAPGKGLEWVSAISGSGGSTYYADSVKGRFTISRDNSKNTLYLQMNSLRAEDTAVYYCVLWFGEGFDPWGQGTLVTVSSGGGGSGGGGSGGGGSDIVLTQSPLSLPVTPGEPASISCRSSQSLLHSNGYNYLDWYLQKPGQSPQLLIYLGSNRASGVPDRFSGSGSGTDFTLKISRVEAEDVGVYYCMQALQTPLTFGGGTKVDIK

SEQ ID NO: 1166 - DNA, 733 bp, synthetic construct
  misc_feature 1..733: note = source = /note="Description of Artificial Sequence: Synthetic polynucleotide"
  source 1..733: mol_type = other DNA
gaagtgcagctgcttgagagcggtggaggtctggtgcagcccgggggatcactgcgcctgtcctgtgccgcgtccggtttcactttctcctcgtacgccatgtcgtgggtcagacaggcaccgggaaagggactggaatgggtgtcagccatttcgggttcggggggcagcacctactacgctgactccgtgaagggccggttcaccatttcccgcgacaactccaagaacaccttgtacctccaaatgaactccctgcgggccgaagataccgccgtgtattactgcgtgctgtggttcggagagggattcgacccgtggggacaaggaacactcgtgactgtgtcatccggcggaggcggcagcggtggcggcggttccggcggcggcggatctgacatcgtgttgacccagtcccctctgagcctgccggtcactcctggcgaaccagccagcatctcctgccggtcgagccagtccctcctgcactccaatgggtacaactacctcgattggtatctgcaaaagccgggccagagcccccagctgctgatctaccttgggtcaaaccgcgcttccggggtgcctgatagattctccgggtccgggagcggaaccgactttaccctgaaaatctcgagggtggaggccgaggacgtcggagtgtactactgcatgcaggcgctccagactcccctgaccttcggaggaggaacgaaggtcgacatcaaga

SEQ ID NO: 1167 - protein, 117 aa, synthetic construct
  REGION 1..117: note = source = /note="Description of Artificial Sequence: Synthetic polypeptide"
EVQLLESGGGLVQPGGSLRLSCAASGFTFSSYAMSWVRQAPGKGLEWVSAISGSGGSTYYADSVKGRFTISRDNSKNTLYLQMNSLRAEDTAVYYCVLWFGEGFDPWGQGTLVTVSS

SEQ ID NO: 1168 - protein, 112 aa, synthetic construct
  REGION 1..112: note = source = /note="Description of Artificial Sequence: Synthetic polypeptide"
DIVLTQSPLSLPVTPGEPASISCRSSQSLLHSNGYNYLDWYLQKPGQSPQLLIYLGSNRASGVPDRFSGSGSGTDFTLKISRVEAEDVGVYYCMQALQTPLTFGGGTKVDIK

SEQ ID NO: 1169 - protein, 488 aa, synthetic construct
  REGION 1..488: note = source = /note="Description of Artificial Sequence: Synthetic polypeptide"
MALPVTALLLPLALLLHAARPEVQLLESGGGLVQPGGSLRLSCAASGFTFSSYAMSWVRQAPGKGLEWVSAISGSGGSTYYADSVKGRFTISRDNSKNTLYLQMNSLRAEDTAVYYCVLWFGEGFDPWGQGTLVTVSSGGGGSGGGGSGGGGSDIVLTQSPLSLPVTPGEPASISCRSSQSLLHSNGYNYLDWYLQKPGQSPQLLIYLGSNRASGVPDRFSGSGSGTDFTLKISRVEAEDVGVYYCMQALQTPLTFGGGTKVDIKTTTPAPRPPTPAPTIASQPLSLRPEACRPAAGGAVHTRGLDFACDIYIWAPLAGTCGVLLLSLVITLYCKRGRKKLLYIFKQPFMRPVQTTQEEDGCSCRFPEEEEGGCELRVKFSRSADAPAYKQGQNQLYNELNLGRREEYDVLDKRRGRDPEMGGKPRRKNPQEGLYNELQKDKMAEAYSEIGMKGERRRGKGHDGLYQGLSTATKDTYDALHMQALPPR

SEQ ID NO: 1170 - DNA, 1464 bp, synthetic construct
  misc_feature 1..1464: note = source = /note="Description of Artificial Sequence: Synthetic polynucleotide"
  source 1..1464: mol_type = other DNA
atggccctccctgtcaccgccctgctgcttccgctggctcttctgctccacgccgctcggcccgaagtgcagctgcttgagagcggtggaggtctggtgcagcccgggggatcactgcgcctgtcctgtgccgcgtccggtttcactttctcctcgtacgccatgtcgtgggtcagacaggcaccgggaaagggactggaatgggtgtcagccatttcgggttcggggggcagcacctactacgctgactccgtgaagggccggttcaccatttcccgcgacaactccaagaacaccttgtacctccaaatgaactccctgcgggccgaagataccgccgtgtattactgcgtgctgtggttcggagagggattcgacccgtggggacaaggaacactcgtgactgtgtcatccggcggaggcggcagcggtggcggcggttccggcggcggcggatctgacatcgtgttgacccagtcccctctgagcctgccggtcactcctggcgaaccagccagcatctcctgccggtcgagccagtccctcctgcactccaatgggtacaactacctcgattggtatctgcaaaagccgggccagagcccccagctgctgatctaccttgggtcaaaccgcgcttccggggtgcctgatagattctccgggtccgggagcggaaccgactttaccctgaaaatctcgagggtggaggccgaggacgtcggagtgtactactgcatgcaggcgctccagactcccctgaccttcggaggaggaacgaaggtcgacatcaagaccactaccccagcaccgaggccacccaccccggctcctaccatcgcctcccagcctctgtccctgcgtccggaggcatgtagacccgcagctggtggggccgtgcatacccggggtcttgacttcgcctgcgatatctacatttgggcccctctggctggtacttgcggggtcctgctgctttcactcgtgatcactctttactgtaagcgcggtcggaagaagctgctgtacatctttaagcaacccttcatgaggcctgtgcagactactcaagaggaggacggctgttcatgccggttcccagaggaggaggaaggcggctgcgaactgcgcgtgaaattcagccgcagcgcagatgctccagcctacaagcaggggcagaaccagctctacaacgaactcaatcttggtcggagagaggagtacgacgtgctggacaagcggagaggacgggacccagaaatgggcgggaagccgcgcagaaagaatccccaagagggcctgtacaacgagctccaaaaggataagatggcagaagcctatagcgagattggtatgaaaggggaacgcagaagaggcaaaggccacgacggactgtaccagggactcagcaccgccaccaaggacacctatgacgctcttcacatgcaggccctgccgcctcgg

SEQ ID NO: 1171 - protein, 251 aa, synthetic construct
  REGION 1..251: note = source = /note="Description of Artificial Sequence: Synthetic polypeptide"
QVQLVESGGGLVQPGGSLRLSCAASGFTFSSYAMSWVRQAPGKGLEWVSAISGSGGSTYYADSVKGRFTISRDNSKNTLYLQMNSLRAEDTAVYYCAKVGYDSSGYYRDYYGMDVWGQGTTVTVSSGGGGSGGGGSGGGGSEIVLTQSPGTLSLSPGERATLSCRASQSVSSSYLAWYQQKPGQAPRLLIYGTSSRATGISDRFSGSGSGTDFTLTISRLEPEDFAVYYCQHYGNSPPKFTFGPGTKLEIK

SEQ ID NO: 1172 - DNA, 753 bp, synthetic construct
  misc_feature 1..753: note = source = /note="Description of Artificial Sequence: Synthetic polynucleotide"
  source 1..753: mol_type = other DNA
caagtgcagctcgtggagtcaggcggaggactggtgcagcccgggggctccctgagactttcctgcgcggcatcgggttttaccttctcctcctatgctatgtcctgggtgcgccaggccccgggaaagggactggaatgggtgtccgcaatcagcggtagcgggggctcaacatactacgccgactccgtcaagggtcgcttcactatttcccgggacaactccaagaataccctgtacctccaaatgaacagcctcagggccgaggatactgccgtgtactactgcgccaaagtcggatacgatagctccggttactaccgggactactacggaatggacgtgtggggacagggcaccaccgtgaccgtgtcaagcggcggaggcggttcaggagggggaggctccggcggtggagggtccgaaatcgtcctgactcagtcgcctggcactctgtcgttgtccccgggggagcgcgctaccctgtcgtgtcgggcgtcgcagtccgtgtcgagctcctacctcgcgtggtaccagcagaagcccggacaggcccctagacttctgatctacggcacttcttcacgcgccaccgggatcagcgacaggttcagcggctccggctccgggaccgacttcaccctgaccattagccggctggagcctgaagatttcgccgtgtattactgccaacactacggaaactcgccgccaaagttcacgttcggacccggaaccaagctggaaatcaag

SEQ ID NO: 1173 - protein, 126 aa, synthetic construct
  REGION 1..126: note = source = /note="Description of Artificial Sequence: Synthetic polypeptide"
QVQLVESGGGLVQPGGSLRLSCAASGFTFSSYAMSWVRQAPGKGLEWVSAISGSGGSTYYADSVKGRFTISRDNSKNTLYLQMNSLRAEDTAVYYCAKVGYDSSGYYRDYYGMDVWGQGTTVTVSS

SEQ ID NO: 1174 - protein, 110 aa, synthetic construct
  REGION 1..110: note = source = /note="Description of Artificial Sequence: Synthetic polypeptide"
EIVLTQSPGTLSLSPGERATLSCRASQSVSSSYLAWYQQKPGQAPRLLIYGTSSRATGISDRFSGSGSGTDFTLTISRLEPEDFAVYYCQHYGNSPPKFTFGPGTKLEIK

SEQ ID NO: 1175 - protein, 495 aa, synthetic construct
  REGION 1..495: note = source = /note="Description of Artificial Sequence: Synthetic polypeptide"
MALPVTALLLPLALLLHAARPQVQLVESGGGLVQPGGSLRLSCAASGFTFSSYAMSWVRQAPGKGLEWVSAISGSGGSTYYADSVKGRFTISRDNSKNTLYLQMNSLRAEDTAVYYCAKVGYDSSGYYRDYYGMDVWGQGTTVTVSSGGGGSGGGGSGGGGSEIVLTQSPGTLSLSPGERATLSCRASQSVSSSYLAWYQQKPGQAPRLLIYGTSSRATGISDRFSGSGSGTDFTLTISRLEPEDFAVYYCQHYGNSPPKFTFGPGTKLEIKTTTPAPRPPTPAPTIASQPLSLRPEACRPAAGGAVHTRGLDFACDIYIWAPLAGTCGVLLLSLVITLYCKRGRKKLLYIFKQPFMRPVQTTQEEDGCSCRFPEEEEGGCELRVKFSRSADAPAYKQGQNQLYNELNLGRREEYDVLDKRRGRDPEMGGKPRRKNPQEGLYNELQKDKMAEAYSEIGMKGERRRGKGHDGLYQGLSTATKDTYDALHMQALPPR

SEQ ID NO: 1176 - DNA, 1485 bp, synthetic construct
  misc_feature 1..1485: note = source = /note="Description of Artificial Sequence: Synthetic polynucleotide"
  source 1..1485: mol_type = other DNA
atggccctccctgtcaccgccctgctgcttccgctggctcttctgctccacgccgctcggccccaagtgcagctcgtggagtcaggcggaggactggtgcagcccgggggctccctgagactttcctgcgcggcatcgggttttaccttctcctcctatgctatgtcctgggtgcgccaggccccgggaaagggactggaatgggtgtccgcaatcagcggtagcgggggctcaacatactacgccgactccgtcaagggtcgcttcactatttcccgggacaactccaagaataccctgtacctccaaatgaacagcctcagggccgaggatactgccgtgtactactgcgccaaagtcggatacgatagctccggttactaccgggactactacggaatggacgtgtggggacagggcaccaccgtgaccgtgtcaagcggcggaggcggttcaggagggggaggctccggcggtggagggtccgaaatcgtcctgactcagtcgcctggcactctgtcgttgtccccgggggagcgcgctaccctgtcgtgtcgggcgtcgcagtccgtgtcgagctcctacctcgcgtggtaccagcagaagcccggacaggcccctagacttctgatctacggcacttcttcacgcgccaccgggatcagcgacaggttcagcggctccggctccgggaccgacttcaccctgaccattagccggctggagcctgaagatttcgccgtgtattactgccaacactacggaaactcgccgccaaagttcacgttcggacccggaaccaagctggaaatcaagaccactaccccagcaccgaggccacccaccccggctcctaccatcgcctcccagcctctgtccctgcgtccggaggcatgtagacccgcagctggtggggccgtgcatacccggggtcttgacttcgcctgcgatatctacatttgggcccctctggctggtacttgcggggtcctgctgctttcactcgtgatcactctttactgtaagcgcggtcggaagaagctgctgtacatctttaagcaacccttcatgaggcctgtgcagactactcaagaggaggacggctgttcatgccggttcccagaggaggaggaaggcggctgcgaactgcgcgtgaaattcagccgcagcgcagatgctccagcctacaagcaggggcagaaccagctctacaacgaactcaatcttggtcggagagaggagtacgacgtgctggacaagcggagaggacgggacccagaaatgggcgggaagccgcgcagaaagaatccccaagagggcctgtacaacgagctccaaaaggataagatggcagaagcctatagcgagattggtatgaaaggggaacgcagaagaggcaaaggccacgacggactgtaccagggactcagcaccgccaccaaggacacctatgacgctcttcacatgcaggccctgccgcctcgg

SEQ ID NO: 1177 - protein, 246 aa, synthetic construct
  REGION 1..246: note = source = /note="Description of Artificial Sequence: Synthetic polypeptide"
EVQLVESGGGLVQPGGSLRLSCAASGFTFSSYAMSWVRQAPGKGLEWVSAISGSGGSTYYADSVKGRFTISRDNSKNTLYLQMNSLRAEDTAVYYCAKMGWSSGYLGAFDIWGQGTTVTVSSGGGGSGGGGSGGGGSEIVLTQSPGTLSLSPGERATLSCRASQSVASSFLAWYQQKPGQAPRLLIYGASGRATGIPDRFSGSGSGTDFTLTISRLEPEDFAVYYCQHYGGSPRLTFGGGTKVDIK

SEQ ID NO: 1178 - DNA, 739 bp, synthetic construct
  misc_feature 1..739: note = source = /note="Description of Artificial Sequence: Synthetic polynucleotide"
  source 1..739: mol_type = other DNA
gaagtccaactggtggagtccgggggagggctcgtgcagcccggaggcagccttcggctgtcgtgcgccgcctccgggttcacgttctcatcctacgcgatgtcgtgggtcagacaggcaccaggaaagggactggaatgggtgtccgccattagcggctccggcggtagcacctactatgccgactcagtgaagggaaggttcactatctcccgcgacaacagcaagaacaccctgtacctccaaatgaactctctgcgggccgaggataccgcggtgtactattgcgccaagatgggttggtccagcggatacttgggagccttcgacatttggggacagggcactactgtgaccgtgtcctccgggggtggcggatcgggaggcggcggctcgggtggagggggttccgaaatcgtgttgacccagtcaccgggaaccctctcgctgtccccgggagaacgggctacactgtcatgtagagcgtcccagtccgtggcttcctcgttcctggcctggtaccagcagaagccgggacaggcaccccgcctgctcatctacggagccagcggccgggcgaccggcatccctgaccgcttctccggttccggctcgggcaccgactttactctgaccattagcaggcttgagcccgaggattttgccgtgtactactgccaacactacggggggagccctcgcctgaccttcggaggcggaactaaggtcgatatcaaaa

SEQ ID NO: 1179 - protein, 122 aa, synthetic construct
  REGION 1..122: note = source = /note="Description of Artificial Sequence: Synthetic polypeptide"
EVQLVESGGGLVQPGGSLRLSCAASGFTFSSYAMSWVRQAPGKGLEWVSAISGSGGSTYYADSVKGRFTISRDNSKNTLYLQMNSLRAEDTAVYYCAKMGWSSGYLGAFDIWGQGTTVTVSS

SEQ ID NO: 1180 - protein, 109 aa, synthetic construct
  REGION 1..109: note = source = /note="Description of Artificial Sequence: Synthetic polypeptide"
EIVLTQSPGTLSLSPGERATLSCRASQSVASSFLAWYQQKPGQAPRLLIYGASGRATGIPDRFSGSGSGTDFTLTISRLEPEDFAVYYCQHYGGSPRLTFGGGTKVDIK

SEQ ID NO: 1181 - protein, 490 aa, synthetic construct
  REGION 1..490: note = source = /note="Description of Artificial Sequence: Synthetic polypeptide"
MALPVTALLLPLALLLHAARPEVQLVESGGGLVQPGGSLRLSCAASGFTFSSYAMSWVRQAPGKGLEWVSAISGSGGSTYYADSVKGRFTISRDNSKNTLYLQMNSLRAEDTAVYYCAKMGWSSGYLGAFDIWGQGTTVTVSSGGGGSGGGGSGGGGSEIVLTQSPGTLSLSPGERATLSCRASQSVASSFLAWYQQKPGQAPRLLIYGASGRATGIPDRFSGSGSGTDFTLTISRLEPEDFAVYYCQHYGGSPRLTFGGGTKVDIKTTTPAPRPPTPAPTIASQPLSLRPEACRPAAGGAVHTRGLDFACDIYIWAPLAGTCGVLLLSLVITLYCKRGRKKLLYIFKQPFMRPVQTTQEEDGCSCRFPEEEEGGCELRVKFSRSADAPAYKQGQNQLYNELNLGRREEYDVLDKRRGRDPEMGGKPRRKNPQEGLYNELQKDKMAEAYSEIGMKGERRRGKGHDGLYQGLSTATKDTYDALHMQALPPR

SEQ ID NO: 1182 - DNA, 1470 bp, synthetic construct
  misc_feature 1..1470: note = source = /note="Description of Artificial Sequence: Synthetic polynucleotide"
  source 1..1470: mol_type = other DNA
atggccctccctgtcaccgccctgctgcttccgctggctcttctgctccacgccgctcggcccgaagtccaactggtggagtccgggggagggctcgtgcagcccggaggcagccttcggctgtcgtgcgccgcctccgggttcacgttctcatcctacgcgatgtcgtgggtcagacaggcaccaggaaagggactggaatgggtgtccgccattagcggctccggcggtagcacctactatgccgactcagtgaagggaaggttcactatctcccgcgacaacagcaagaacaccctgtacctccaaatgaactctctgcgggccgaggataccgcggtgtactattgcgccaagatgggttggtccagcggatacttgggagccttcgacatttggggacagggcactactgtgaccgtgtcctccgggggtggcggatcgggaggcggcggctcgggtggagggggttccgaaatcgtgttgacccagtcaccgggaaccctctcgctgtccccgggagaacgggctacactgtcatgtagagcgtcccagtccgtggcttcctcgttcctggcctggtaccagcagaagccgggacaggcaccccgcctgctcatctacggagccagcggccgggcgaccggcatccctgaccgcttctccggttccggctcgggcaccgactttactctgaccattagcaggcttgagcccgaggattttgccgtgtactactgccaacactacggggggagccctcgcctgaccttcggaggcggaactaaggtcgatatcaaaaccactaccccagcaccgaggccacccaccccggctcctaccatcgcctcccagcctctgtccctgcgtccggaggcatgtagacccgcagctggtggggccgtgcatacccggggtcttgacttcgcctgcgatatctacatttgggcccctctggctggtacttgcggggtcctgctgctttcactcgtgatcactctttactgtaagcgcggtcggaagaagctgctgtacatctttaagcaacccttcatgaggcctgtgcagactactcaagaggaggacggctgttcatgccggttcccagaggaggaggaaggcggctgcgaactgcgcgtgaaattcagccgcagcgcagatgctccagcctacaagcaggggcagaaccagctctacaacgaactcaatcttggtcggagagaggagtacgacgtgctggacaagcggagaggacgggacccagaaatgggcgggaagccgcgcagaaagaatccccaagagggcctgtacaacgagctccaaaaggataagatggcagaagcctatagcgagattggtatgaaaggggaacgcagaagaggcaaaggccacgacggactgtaccagggactcagcaccgccaccaaggacacctatgacgctcttcacatgcaggccctgccgcctcgg

SEQ ID NO: 1183 - protein, 122 aa, synthetic construct
  REGION 1..122: note = source = /note="Description of Artificial Sequence: Synthetic polypeptide"
QIQLVQSGPDLKKPGETVKLSCKASGYTFTNFGMNWVKQAPGKGFKWMAWINTYTGESYFADDFKGRFAFSVETSATTAYLQINNLKTEDTATYFCARGEIYYGYDGGFAYWGQGTLVTVSA

SEQ ID NO: 1184 - protein, 107 aa, synthetic construct
  REGION 1..107: note = source = /note="Description of Artificial Sequence: Synthetic polypeptide"
DVVMTQSHRFMSTSVGDRVSITCRASQDVNTAVSWYQQKPGQSPKLLIFSASYRYTGVPDRFTGSGSGADFTLTISSVQAEDLAVYYCQQHYSTPWTFGGGTKLDIK

SEQ ID NO: 1185 - protein, 244 aa, synthetic construct
  REGION 1..244: note = source = /note="Description of Artificial Sequence: Synthetic polypeptide"
QIQLVQSGPDLKKPGETVKLSCKASGYTFTNFGMNWVKQAPGKGFKWMAWINTYTGESYFADDFKGRFAFSVETSATTAYLQINNLKTEDTATYFCARGEIYYGYDGGFAYWGQGTLVTVSAGGGGSGGGGSGGGGSDVVMTQSHRFMSTSVGDRVSITCRASQDVNTAVSWYQQKPGQSPKLLIFSASYRYTGVPDRFTGSGSGADFTLTISSVQAEDLAVYYCQQHYSTPWTFGGGTKLDIK

SEQ ID NO: 1186 - protein, 467 aa, synthetic construct
  REGION 1..467: note = source = /note="Description of Artificial Sequence: Synthetic polypeptide"
QIQLVQSGPDLKKPGETVKLSCKASGYTFTNFGMNWVKQAPGKGFKWMAWINTYTGESYFADDFKGRFAFSVETSATTAYLQINNLKTEDTATYFCARGEIYYGYDGGFAYWGQGTLVTVSAGGGGSGGGGSGGGGSDVVMTQSHRFMSTSVGDRVSITCRASQDVNTAVSWYQQKPGQSPKLLIFSASYRYTGVPDRFTGSGSGADFTLTISSVQAEDLAVYYCQQHYSTPWTFGGGTKLDIKTTTPAPRPPTPAPTIASQPLSLRPEACRPAAGGAVHTRGLDFACDIYIWAPLAGTCGVLLLSLVITLYCKRGRKKLLYIFKQPFMRPVQTTQEEDGCSCRFPEEEEGGCELRVKFSRSADAPAYKQGQNQLYNELNLGRREEYDVLDKRRGRDPEMGGKPRRKNPQEGLYNELQKDKMAEAYSEIGMKGERRRGKGHDGLYQGLSTATKDTYDALHMQALPPR

SEQ ID NO: 1187 - protein, 117 aa, synthetic construct; identical to SEQ ID NO: 425
  REGION 1..117: note = source = /note="Description of Artificial Sequence: Synthetic polypeptide"

SEQ ID NO: 1188 - protein, 111 aa, synthetic construct
  REGION 1..111: note = source = /note="Description of Artificial Sequence: Synthetic polypeptide"
DIVLTQSPASLAMSLGKRATISCRASESVSVIGAHLIHWYQQKPGQPPKLLIYLASNLETGVPARFSGSGSGTDFTLTIDPVEEDDVAIYSCLQSRIFPRTFGGGTKLEIK

SEQ ID NO: 1189 - protein, 249 aa, synthetic construct
  REGION 1..249: note = source = /note="Description of Artificial Sequence: Synthetic polypeptide"
QIQLVQSGPELKKPGETVKISCKASGYTFTDYSINWVKRAPGKGLKWMGWINTETREPAYAYDFRGRFAFSLETSASTAYLQINNLKYEDTATYFCALDYSYAMDYWGQGTSVTVSSGGGGSGGGGSGGGGSQIQLVQSGPELKKPGETVKISCKASGYTFTDYSINWVKRAPGKGLKWMGWINTETREPAYAYDFRGRFAFSLETSASTAYLQINNLKYEDTATYFCALDYSYAMDYWGQGTSVTVSS

SEQ ID NO: 1190 - protein, 472 aa, synthetic construct
  REGION 1..472: note = source = /note="Description of Artificial Sequence: Synthetic polypeptide"
QIQLVQSGPELKKPGETVKISCKASGYTFTDYSINWVKRAPGKGLKWMGWINTETREPAYAYDFRGRFAFSLETSASTAYLQINNLKYEDTATYFCALDYSYAMDYWGQGTSVTVSSGGGGSGGGGSGGGGSQIQLVQSGPELKKPGETVKISCKASGYTFTDYSINWVKRAPGKGLKWMGWINTETREPAYAYDFRGRFAFSLETSASTAYLQINNLKYEDTATYFCALDYSYAMDYWGQGTSVTVSSTTTPAPRPPTPAPTIASQPLSLRPEACRPAAGGAVHTRGLDFACDIYIWAPLAGTCGVLLLSLVITLYCKRGRKKLLYIFKQPFMRPVQTTQEEDGCSCRFPEEEEGGCELRVKFSRSADAPAYKQGQNQLYNELNLGRREEYDVLDKRRGRDPEMGGKPRRKNPQEGLYNELQKDKMAEAYSEIGMKGERRRGKGHDGLYQGLSTATKDTYDALHMQALPPR

SEQ ID NO: 1191 - protein, 117 aa, synthetic construct
  REGION 1..117: note = source = /note="Description of Artificial Sequence: Synthetic polypeptide"
QIQLVQSGPELKKPGETVKISCKASGYTFRHYSMNWVKQAPGKGLKWMGRINTESGVPIYADDFKGRFAFSVETSASTAYLVINNLKDEDTASYFCSNDYLYSLDFWGQGTALTVSS

SEQ ID NO: 1192 - protein, 111 aa, synthetic construct
  REGION 1..111: note = source = /note="Description of Artificial Sequence: Synthetic polypeptide"
DIVLTQSPPSLAMSLGKRATISCRASESVTILGSHLIYWYQQKPGQPPTLLIQLASNVQTGVPARFSGSGSRTDFTLTIDPVEEDDVAVYYCLQSRTIPRTFGGGTKLEIK

SEQ ID NO: 1193 - protein, 243 aa, synthetic construct
  REGION 1..243: note = source = /note="Description of Artificial Sequence: Synthetic polypeptide"
QIQLVQSGPELKKPGETVKISCKASGYTFRHYSMNWVKQAPGKGLKWMGRINTESGVPIYADDFKGRFAFSVETSASTAYLVINNLKDEDTASYFCSNDYLYSLDFWGQGTALTVSSGGGGSGGGGSGGGGSDIVLTQSPPSLAMSLGKRATISCRASESVTILGSHLIYWYQQKPGQPPTLLIQLASNVQTGVPARFSGSGSRTDFTLTIDPVEEDDVAVYYCLQSRTIPRTFGGGTKLEIK

SEQ ID NO: 1194 - protein, 466 aa, synthetic construct
  REGION 1..466: note = source = /note="Description of Artificial Sequence: Synthetic polypeptide"
QIQLVQSGPELKKPGETVKISCKASGYTFRHYSMNWVKQAPGKGLKWMGRINTESGVPIYADDFKGRFAFSVETSASTAYLVINNLKDEDTASYFCSNDYLYSLDFWGQGTALTVSSGGGGSGGGGSGGGGSDIVLTQSPPSLAMSLGKRATISCRASESVTILGSHLIYWYQQKPGQPPTLLIQLASNVQTGVPARFSGSGSRTDFTLTIDPVEEDDVAVYYCLQSRTIPRTFGGGTKLEIKTTTPAPRPPTPAPTIASQPLSLRPEACRPAAGGAVHTRGLDFACDIYIWAPLAGTCGVLLLSLVITLYCKRGRKKLLYIFKQPFMRPVQTTQEEDGCSCRFPEEEEGGCELRVKFSRSADAPAYKQGQNQLYNELNLGRREEYDVLDKRRGRDPEMGGKPRRKNPQEGLYNELQKDKMAEAYSEIGMKGERRRGKGHDGLYQGLSTATKDTYDALHMQALPPR

SEQ ID NO: 1195 - protein, 117 aa, synthetic construct
  REGION 1..117: note = source = /note="Description of Artificial Sequence: Synthetic polypeptide"
QIQLVQSGPELKKPGETVKISCKASGYTFTHYSMNWVKQAPGKGLKWMGRINTETGEPLYADDFKGRFAFSLETSASTAYLVINNLKNEDTATFFCSNDYLYSCDYWGQGTTLTVSS

SEQ ID NO: 1196 - protein, 111 aa, synthetic construct; identical to SEQ ID NO: 1192
  REGION 1..111: note = source = /note="Description of Artificial Sequence: Synthetic polypeptide"

SEQ ID NO: 1197 - protein, 243 aa, synthetic construct
  REGION 1..243: note = source = /note="Description of Artificial Sequence: Synthetic polypeptide"
QIQLVQSGPELKKPGETVKISCKASGYTFTHYSMNWVKQAPGKGLKWMGRINTETGEPLYADDFKGRFAFSLETSASTAYLVINNLKNEDTATFFCSNDYLYSCDYWGQGTTLTVSSGGGGSGGGGSGGGGSDIVLTQSPPSLAMSLGKRATISCRASESVTILGSHLIYWYQQKPGQPPTLLIQLASNVQTGVPARFSGSGSRTDFTLTIDPVEEDDVAVYYCLQSRTIPRTFGGGTKLEIK

SEQ ID NO: 1198 - protein, 466 aa, synthetic construct
  REGION 1..466: note = source = /note="Description of Artificial Sequence: Synthetic polypeptide"
QIQLVQSGPELKKPGETVKISCKASGYTFTHYSMNWVKQAPGKGLKWMGRINTETGEPLYADDFKGRFAFSLETSASTAYLVINNLKNEDTATFFCSNDYLYSCDYWGQGTTLTVSSGGGGSGGGGSGGGGSDIVLTQSPPSLAMSLGKRATISCRASESVTILGSHLIYWYQQKPGQPPTLLIQLASNVQTGVPARFSGSGSRTDFTLTIDPVEEDDVAVYYCLQSRTIPRTFGGGTKLEIKTTTPAPRPPTPAPTIASQPLSLRPEACRPAAGGAVHTRGLDFACDIYIWAPLAGTCGVLLLSLVITLYCKRGRKKLLYIFKQPFMRPVQTTQEEDGCSCRFPEEEEGGCELRVKFSRSADAPAYKQGQNQLYNELNLGRREEYDVLDKRRGRDPEMGGKPRRKNPQEGLYNELQKDKMAEAYSEIGMKGERRRGKGHDGLYQGLSTATKDTYDALHMQALPPR

SEQ ID NO: 1199 - protein, 5 aa, synthetic construct
  REGION 1..5: note = source = /note="Description of Artificial Sequence: Synthetic peptide"
NHGMS

SEQ ID NO: 1200 - protein, 5 aa, synthetic construct
  REGION 1..5: note = source = /note="Description of Artificial Sequence: Synthetic peptide"
NYAMS

SEQ ID NO: 1201 - protein, 5 aa, synthetic construct
  REGION 1..5: note = source = /note="Description of Artificial Sequence: Synthetic peptide"
DYAMH

SEQ ID NO: 1202 - protein, 5 aa, synthetic construct
  REGION 1..5: note = source = /note="Description of Artificial Sequence: Synthetic peptide"
NHGMS

SEQ ID NO: 1203 - protein, 5 aa, synthetic construct
  REGION 1..5: note = source = /note="Description of Artificial Sequence: Synthetic peptide"
NFGIN

SEQ ID NO: 1204 - protein, 5 aa, synthetic construct
  REGION 1..5: note = source = /note="Description of Artificial Sequence: Synthetic peptide"
SDAMT

SEQ ID NO: 1205 - protein, 5 aa, synthetic construct
  REGION 1..5: note = source = /note="Description of Artificial Sequence: Synthetic peptide"
NYGIT

SEQ ID NO: 1206 - protein, 5 aa, synthetic construct
  REGION 1..5: note = source = /note="Description of Artificial Sequence: Synthetic peptide"
NHGMS

SEQ ID NO: 1207 - protein, 5 aa, synthetic construct
  REGION 1..5: note = source = /note="Description of Artificial Sequence: Synthetic peptide"
NHGMS

SEQ ID NO: 1208 - protein, 5 aa, synthetic construct
  REGION 1..5: note = source = /note="Description of Artificial Sequence: Synthetic peptide"
NHGMS

SEQ ID NO: 1209 - protein, 5 aa, synthetic construct
  REGION 1..5: note = source = /note="Description of Artificial Sequence: Synthetic peptide"
DYYMS

SEQ ID NO: 1210 - protein, 5 aa, synthetic construct
  REGION 1..5: note = source = /note="Description of Artificial Sequence: Synthetic peptide"
DYYMS

SEQ ID NO: 1211 - protein, 5 aa, synthetic construct
  REGION 1..5: note = source = /note="Description of Artificial Sequence: Synthetic peptide"
NHGMS

SEQ ID NO: 1212 - protein, 5 aa, synthetic construct
  REGION 1..5: note = source = /note="Description of Artificial Sequence: Synthetic peptide"
NHGMS

SEQ ID NO: 1213 - protein, 5 aa, synthetic construct
  REGION 1..5: note = source = /note="Description of Artificial Sequence: Synthetic peptide"
NHGMS

SEQ ID NO: 1214 - protein, 7 aa, synthetic construct
  REGION 1..7: note = source = /note="Description of Artificial Sequence: Synthetic peptide"
SSYYYWG

SEQ ID NO: 1215 - protein, 7 aa, synthetic construct
  REGION 1..7: note = source = /note="Description of Artificial Sequence: Synthetic peptide"
TSGMCVS

SEQ ID NO: 1216 - protein, 5 aa, synthetic construct
  REGION 1..5: note = source = /note="Description of Artificial Sequence: Synthetic peptide"
SYSMN

SEQ ID NO: 1217 - protein, 5 aa, synthetic construct
  REGION 1..5: note = source = /note="Description of Artificial Sequence: Synthetic peptide"
DYYMS

SEQ ID NO: 1218 - protein, 5 aa, synthetic construct
  REGION 1..5: note = source = /note="Description of Artificial Sequence: Synthetic peptide"
SHYIH

SEQ ID NO: 1219 - protein, 7 aa, synthetic construct
  REGION 1..7: note = source = /note="Description of Artificial Sequence: Synthetic peptide"
SGGYYWS

SEQ ID NO: 1220 - protein, 5 aa, synthetic construct
  REGION 1..5: note = source = /note="Description of Artificial Sequence: Synthetic peptide"
SYAIS

SEQ ID NO: 1221 - protein, 7 aa, synthetic construct
  REGION 1..7: note = source = /note="Description of Artificial Sequence: Synthetic peptide"
SNSAAWN

SEQ ID NO: 1222 - protein, 5 aa, synthetic construct
  REGION 1..5: note = source = /note="Description of Artificial Sequence: Synthetic peptide"
SYAMS

SEQ ID NO: 1223 - protein, 5 aa, synthetic construct
  REGION 1..5: note = source = /note="Description of Artificial Sequence: Synthetic peptide"
RYPMS

SEQ ID NO: 1224 - protein, 5 aa, synthetic construct
  REGION 1..5: note = source = /note="Description of Artificial Sequence: Synthetic peptide"
SYAMS

SEQ ID NO: 1225 - protein, 5 aa, synthetic construct
  REGION 1..5: note = source = /note="Description of Artificial Sequence: Synthetic peptide"
SYAMS

SEQ ID NO: 1226 - protein, 5 aa, synthetic construct
  REGION 1..5: note = source = /note="Description of Artificial Sequence: Synthetic peptide"
DYAMH

SEQ ID NO: 1227 - protein, 5 aa, synthetic construct
  REGION 1..5: note = source = /note="Description of Artificial Sequence: Synthetic peptide"
DYAMH

SEQ ID NO: 1228 - protein, 5 aa, synthetic construct
  REGION 1..5: note = source = /note="Description of Artificial Sequence: Synthetic peptide"
SYAMS

SEQ ID NO: 1229 - protein, 5 aa, synthetic construct
  REGION 1..5: note = source = /note="Description of Artificial Sequence: Synthetic peptide"
SYAMS

SEQ ID NO: 1230 - protein, 5 aa, synthetic construct
  REGION 1..5: note = source = /note="Description of Artificial Sequence: Synthetic peptide"
SYAMS

SEQ ID NO: 1231 - protein, 5 aa, synthetic construct
  REGION 1..5: note = source = /note="Description of Artificial Sequence: Synthetic peptide"
SYAMS

SEQ ID NO: 1232 - protein, 5 aa, synthetic construct
  REGION 1..5: note = source = /note="Description of Artificial Sequence: Synthetic peptide"
SYAMS

SEQ ID NO: 1233 - protein, 5 aa, synthetic construct
  REGION 1..5: note = source = /note="Description of Artificial Sequence: Synthetic peptide"
SYAMS

SEQ ID NO: 1234 - protein, 5 aa, synthetic construct
  REGION 1..5: note = source = /note="Description of Artificial Sequence: Synthetic peptide"
SYAMS

SEQ ID NO: 1235 - protein, 5 aa, synthetic construct
  REGION 1..5: note = source = /note="Description of Artificial Sequence: Synthetic peptide"
NFGMN

SEQ ID NO: 1236 - protein, 5 aa, synthetic construct
  REGION 1..5: note = source = /note="Description of Artificial Sequence: Synthetic peptide"
DYSIN

SEQ ID NO: 1237 - protein, 5 aa, synthetic construct
  REGION 1..5: note = source = /note="Description of Artificial Sequence: Synthetic peptide"
HYSMN

SEQ ID NO: 1238 - protein, 5 aa, synthetic construct
  REGION 1..5: note = source = /note="Description of Artificial Sequence: Synthetic peptide"
HYSMN

SEQ ID NO: 1239 - protein, 16 aa, synthetic construct
  REGION 1..16: note = source = /note="Description of Artificial Sequence: Synthetic peptide"
GIVYSGSTYYAASVKG

SEQ ID NO: 1240 - protein, 17 aa, synthetic construct
  REGION 1..17: note = source = /note="Description of Artificial Sequence: Synthetic peptide"
GISRSGENTYYADSVKG

SEQ ID NO: 1241 - protein, 17 aa, synthetic construct
  REGION 1..17: note = source = /note="Description of Artificial Sequence: Synthetic peptide"
GISWNSGSIGYADSVKG

SEQ ID NO: 1242 - protein, 16 aa, synthetic construct
  REGION 1..16: note = source = /note="Description of Artificial Sequence: Synthetic peptide"
GIVYSGSTYYAASVKG

SEQ ID NO: 1243 - protein, 17 aa, synthetic construct
  REGION 1..17: note = source = /note="Description of Artificial Sequence: Synthetic peptide"
WINPKNNNTNYAQKFQG

SEQ ID NO: 1244 - protein, 17 aa, synthetic construct
  REGION 1..17: note = source = /note="Description of Artificial Sequence: Synthetic peptide"
VISGSGGTTYYADSVKG

SEQ ID NO: 1245 - protein, 17 aa, synthetic construct
  REGION 1..17: note = source = /note="Description of Artificial Sequence: Synthetic peptide"
WISAYNGNTNYAQKFQG

SEQ ID NO: 1246 - protein, 16 aa, synthetic construct
  REGION 1..16: note = source = /note="Description of Artificial Sequence: Synthetic peptide"
GIVYSGSTYYAASVKG

SEQ ID NO: 1247 - protein, 16 aa, synthetic construct
  REGION 1..16: note = source = /note="Description of Artificial Sequence: Synthetic peptide"
GIVYSGSTYYAASVKG

SEQ ID NO: 1248 - protein, 16 aa, synthetic construct
  REGION 1..16: note = source = /note="Description of Artificial Sequence: Synthetic peptide"
GIVYSGSTYYAASVKG

SEQ ID NO: 1249 - protein, 17 aa, synthetic construct
  REGION 1..17: note = source = /note="Description of Artificial Sequence: Synthetic peptide"
YISSSGSTIYYADSVKG

SEQ ID NO: 1250 - protein, 17 aa, synthetic construct
  REGION 1..17: note = source = /note="Description of Artificial Sequence: Synthetic peptide"
YISSSGNTIYYADSVKG

SEQ ID NO: 1251 - protein, 16 aa, synthetic construct
  REGION 1..16: note = source = /note="Description of Artificial Sequence: Synthetic peptide"
GIVYSGSTYYAASVKG

SEQ ID NO: 1252 - protein, 16 aa, synthetic construct
  REGION 1..16: note = source = /note="Description of Artificial Sequence: Synthetic peptide"
GIVYSGSTYYAASVKG

SEQ ID NO: 1253 - protein, 16 aa, synthetic construct
  REGION 1..16: note = source = /note="Description of Artificial Sequence: Synthetic peptide"
GIVYSGSTYYAASVKG

SEQ ID NO: 1254 - protein, 16 aa, synthetic construct
  REGION 1..16: note = source = /note="Description of Artificial Sequence: Synthetic peptide"
SIYYSGSAYYNPSLKS

SEQ ID NO: 1255 - protein, 16 aa, synthetic construct
  REGION 1..16: note = source = /note="Description of Artificial Sequence: Synthetic peptide"
RIDWDEDKFYSTSLKT

SEQ ID NO: 1256 - protein, 17 aa, synthetic construct
  REGION 1..17: note = source = /note="Description of Artificial Sequence: Synthetic peptide"
SISSSSSYIYYADSVKG

SEQ ID NO: 1257 - protein, 17 aa, synthetic construct
  REGION 1..17: note = source = /note="Description of Artificial Sequence: Synthetic peptide"
YISSSGSTIYYADSVKG

SEQ ID NO: 1258 - protein, 17 aa, synthetic construct
  REGION 1..17: note = source = /note="Description of Artificial Sequence: Synthetic peptide"
MINPSGGVTAYSQTLQG

SEQ ID NO: 1259 - protein, 16 aa, synthetic construct
  REGION 1..16: note = source = /note="Description of Artificial Sequence: Synthetic peptide"
YIYYSGSTYYNPSLKS

SEQ ID NO: 1260 - protein, 17 aa, synthetic construct
  REGION 1..17: note = source = /note="Description of Artificial Sequence: Synthetic peptide"
GIIPIFGTANYAQKFQG

SEQ ID NO: 1261 - protein, 18 aa, synthetic construct
  REGION 1..18: note = source = /note="Description of Artificial Sequence: Synthetic peptide"
RTYYRSKWYSFYAISLKS

SEQ ID NO: 1262 - protein, 17 aa, synthetic construct
  REGION 1..17: note = source = /note="Description of Artificial Sequence: Synthetic peptide"
AISGSGGSTYYADSVKG

SEQ ID NO: 1263 - protein, 17 aa, synthetic construct
  REGION 1..17: note = source = /note="Description of Artificial Sequence: Synthetic peptide"
GISDSGVSTYYADSAKG

SEQ ID NO: 1264 - protein, 17 aa, synthetic construct
  REGION 1..17: note = source = /note="Description of Artificial Sequence: Synthetic peptide"
AISGSGGSTYYADSVKG

SEQ ID NO: 1265 - protein, 17 aa, synthetic construct
  REGION 1..17: note = source = /note="Description of Artificial Sequence: Synthetic peptide"
AISGSGGSTYYADSVKG

SEQ ID NO: 1266 - protein, 17 aa, synthetic construct
  REGION 1..17: note = source = /note="Description of Artificial Sequence: Synthetic peptide"
GISWNSGSIGYADSVKG

SEQ ID NO: 1267 - protein, 17 aa, synthetic construct
  REGION 1..17: note = source = /note="Description of Artificial Sequence: Synthetic peptide"
SINWKGNSLAYGDSVKG

SEQ ID NO: 1268 - protein, 17 aa, synthetic construct
  REGION 1..17: note = source = /note="Description of Artificial Sequence: Synthetic peptide"
AISGSGGSTYYADSVKG

SEQ ID NO: 1269 - protein, 17 aa, synthetic construct
  REGION 1..17: note = source = /note="Description of Artificial Sequence: Synthetic peptide"
AISGSGGSTYYADSVKG

SEQ ID NO: 1270 - protein, 17 aa, synthetic construct
  REGION 1..17: note = source = /note="Description of Artificial Sequence: Synthetic peptide"
AISGSGGSTYYADSVKG

SEQ ID NO: 1271 - protein, 17 aa, synthetic construct
  REGION 1..17: note = source = /note="Description of Artificial Sequence: Synthetic peptide"
AISGSGGSTYYADSVKG

SEQ ID NO: 1272 - protein, 17 aa, synthetic construct
  REGION 1..17: note = source = /note="Description of Artificial Sequence: Synthetic peptide"
AISGSGGSTYYADSVKG

SEQ ID NO: 1273 - protein, 17 aa, synthetic construct
  REGION 1..17: note = source = /note="Description of Artificial Sequence: Synthetic peptide"
AISGSGGSTYYADSVKG

SEQ ID NO: 1274 - protein, 17 aa, synthetic construct
  REGION 1..17: note = source = /note="Description of Artificial Sequence: Synthetic peptide"
AISGSGGSTYYADSVKG

SEQ ID NO: 1275 - protein, 17 aa, synthetic construct
  REGION 1..17: note = source = /note="Description of Artificial Sequence: Synthetic peptide"
WINTYTGESYFADDFKG

SEQ ID NO: 1276 - protein, 17 aa, synthetic construct
  REGION 1..17: note = source = /note="Description of Artificial Sequence: Synthetic peptide"
WINTETREPAYAYDFRG

SEQ ID NO: 1277 - protein, 17 aa, synthetic construct
  REGION 1..17: note = source = /note="Description of Artificial Sequence: Synthetic peptide"
RINTESGVPIYADDFKG

SEQ ID NO: 1278 - protein, 17 aa, synthetic construct
  REGION 1..17: note = source = /note="Description of Artificial Sequence: Synthetic peptide"
RINTETGEPLYADDFKG

SEQ ID NO: 1279 - protein, 7 aa, synthetic construct
  REGION 1..7: note = source = /note="Description of Artificial Sequence: Synthetic peptide"
HGGESDV

SEQ ID NO: 1280 - protein, 11 aa, synthetic construct
  REGION 1..11: note = source = /note="Description of Artificial Sequence: Synthetic peptide"
SPAHYYGGMDV

SEQ ID NO: 1281 - protein, 6 aa, synthetic construct
  REGION 1..6: note = source = /note="Description of Artificial Sequence: Synthetic peptide"
HSFLAY

SEQ ID NO: 1282 - protein, 7 aa, synthetic construct
  REGION 1..7: note = source = /note="Description of Artificial Sequence: Synthetic peptide"
HGGESDV

SEQ ID NO: 1283 - protein, 11 aa, synthetic construct
  REGION 1..11: note = source = /note="Description of Artificial Sequence: Synthetic peptide"
GPYYYQSYMDV

SEQ ID NO: 1284 - protein, 14 aa, synthetic construct
  REGION 1..14: note = source = /note="Description of Artificial Sequence: Synthetic peptide"
LDSSGYYYARGPRY

SEQ ID NO: 1285 - protein, 9 aa, synthetic construct
  REGION 1..9: note = source = /note="Description of Artificial Sequence: Synthetic peptide"
GPYYYYMDV

SEQ ID NO: 1286 - protein, 7 aa, synthetic construct
  REGION 1..7: note = source = /note="Description of Artificial Sequence: Synthetic peptide"
HGGESDV

SEQ ID NO: 1287 - protein, 7 aa, synthetic construct
  REGION 1..7: note = source = /note="Description of Artificial Sequence: Synthetic peptide"
HGGESDV

SEQ ID NO: 1288 - protein, 7 aa, synthetic construct
  REGION 1..7: note = source = /note="Description of Artificial Sequence: Synthetic peptide"
HGGESDV

SEQ ID NO: 1289 - protein, 8 aa, synthetic construct
  REGION 1..8: note = source = /note="Description of Artificial Sequence: Synthetic peptide"
ESGDGMDV

SEQ ID NO: 1290 - protein, 8 aa, synthetic construct
  REGION 1..8: note = source = /note="Description of Artificial Sequence: Synthetic peptide"
STMVREDY

SEQ ID NO: 1291 - protein, 7 aa, synthetic construct
  REGION 1..7: note = source = /note="Description of Artificial Sequence: Synthetic peptide"
HGGESDV

SEQ ID NO: 1292 - protein, 7 aa, synthetic construct
  REGION 1..7: note = source = /note="Description of Artificial Sequence: Synthetic peptide"
HGGESDV

SEQ ID NO: 1293 - protein, 7 aa, synthetic construct
  REGION 1..7: note = source = /note="Description of Artificial Sequence: Synthetic peptide"
HGGESDV

SEQ ID NO: 1294 - protein, 11 aa, synthetic construct
  REGION 1..11: note = source = /note="Description of Artificial Sequence: Synthetic peptide"
HWQEWPDAFDI

SEQ ID NO: 1295 - protein, 13 aa, synthetic construct
  REGION 1..13: note = source = /note="Description of Artificial Sequence: Synthetic peptide"
SGAGGTSATAFDI

SEQ ID NO: 1296 - protein, 10 aa, synthetic construct
  REGION 1..10: note = source = /note="Description of Artificial Sequence: Synthetic peptide"
TIAAVYAFDI

SEQ ID NO: 1297 - protein, 8 aa, synthetic construct
  REGION 1..8: note = source = /note="Description of Artificial Sequence: Synthetic peptide"
DLRGAFDI

SEQ ID NO: 1298 - protein, 11 aa, synthetic construct
  REGION 1..11: note = source = /note="Description of Artificial Sequence: Synthetic peptide"
EGSGSGWYFDF

SEQ ID NO: 1299 - protein, 13 aa, synthetic construct
  REGION 1..13: note = source = /note="Description of Artificial Sequence: Synthetic peptide"
AGIAARLRGAFDI

SEQ ID NO: 1300 - protein, 20 aa, synthetic construct
  REGION 1..20: note = source = /note="Description of Artificial Sequence: Synthetic peptide"
RGGYQLLRWDVGLLRSAFDI

SEQ ID NO: 1301 - protein, 13 aa, synthetic construct
  REGION 1..13: note = source = /note="Description of Artificial Sequence: Synthetic peptide"
SSPEGLFLYWFDP

SEQ ID NO: 1302 - protein, 9 aa, synthetic construct
  REGION 1..9: note = source = /note="Description of Artificial Sequence: Synthetic peptide"
VEGSGSLDY

SEQ ID NO: 1303 - protein, 9 aa, synthetic construct
  REGION 1..9: note = source = /note="Description of Artificial Sequence: Synthetic peptide"
RAGSEASDI

SEQ ID NO: 1304 - protein, 15 aa, synthetic construct
  REGION 1..15: note = source = /note="Description of Artificial Sequence: Synthetic peptide"
ATYKRELRYYYGMDV

SEQ ID NO: 1305 - protein, 15 aa, synthetic construct
  REGION 1..15: note = source = /note="Description of Artificial Sequence: Synthetic peptide"
ATYKRELRYYYGMDV

SEQ ID NO: 1306 - protein, 8 aa, synthetic construct
  REGION 1..8: note = source = /note="Description of Artificial Sequence: Synthetic peptide"
VGKAVPDV

SEQ ID NO: 1307 - protein, 13 aa, synthetic construct
  REGION 1..13: note = source = /note="Description of Artificial Sequence: Synthetic peptide"
HQGVAYYNYAMDV

SEQ ID NO: 1308 - protein, 8 aa, synthetic construct
  REGION 1..8: note = source = /note="Description of Artificial Sequence: Synthetic peptide"
VVRDGMDV

SEQ ID NO: 1309 - protein, 9 aa, synthetic construct
  REGION 1..9: note = source = /note="Description of Artificial Sequence: Synthetic peptide"
IPQTGTFDY

SEQ ID NO: 1310 - protein, 15 aa, synthetic construct
  REGION 1..15: note = source = /note="Description of Artificial Sequence: Synthetic peptide"
ANYKRELRYYYGMDV

SEQ ID NO: 1311 - protein, 11 aa, synthetic construct
  REGION 1..11: note = source = /note="Description of Artificial Sequence: Synthetic peptide"
ALVGATGAFDI

SEQ ID NO: 1312 - protein, 8 aa, synthetic construct
  REGION 1..8: note = source = /note="Description of Artificial Sequence: Synthetic peptide"
WFGEGFDP

SEQ ID NO: 1313 - protein, 17 aa, synthetic construct
  REGION 1..17: note = source = /note="Description of Artificial Sequence: Synthetic peptide"
VGYDSSGYYRDYYGMDV

SEQ ID NO: 1314 - protein, 13 aa, synthetic construct
  REGION 1..13: note = source = /note="Description of Artificial Sequence: Synthetic peptide"
MGWSSGYLGAFDI

SEQ ID NO: 1315 - protein, 13 aa, synthetic construct
  REGION 1..13: note = source = /note="Description of Artificial Sequence: Synthetic peptide"
GEIYYGYDGGFAY

SEQ ID NO: 1316 - protein, 8 aa, synthetic construct
  REGION 1..8: note = source = /note="Description of Artificial Sequence: Synthetic peptide"
DYSYAMDY

SEQ ID NO: 1317 - protein, 8 aa, synthetic construct
  REGION 1..8: note = source = /note="Description of Artificial Sequence: Synthetic peptide"
DYLYSLDF

SEQ ID NO: 1318 - protein, 8 aa, synthetic construct
  REGION 1..8: note = source = /note="Description of Artificial Sequence: Synthetic peptide"
DYLYSCDY

SEQ ID NO: 1319 - protein, 11 aa, synthetic construct
  REGION 1..11: note = source = /note="Description of Artificial Sequence: Synthetic peptide"
RASQSISSYLN

SEQ ID NO: 1320 - protein, 12 aa, synthetic construct
  REGION 1..12: note = source = /note="Description of Artificial Sequence: Synthetic peptide"
RASQSISSSFLA

SEQ ID NO: 1321 - protein, 16 aa, synthetic construct
  REGION 1..16: note = source = /note="Description of Artificial Sequence: Synthetic peptide"
RSSQSLLHSNGYNYLD

SEQ ID NO: 1322 - protein, 16 aa, synthetic construct
  REGION 1..16: note = source = /note="Description of Artificial Sequence: Synthetic peptide"
KSSQSLLRNDGKTPLY

SEQ ID NO: 1323 - protein, 16 aa, synthetic construct
  REGION 1..16: note = source = /note="Description of Artificial Sequence: Synthetic peptide"
RSSQSLLHSNGYNYLN

SEQ ID NO: 1324 - protein, 11 aa, synthetic construct
  REGION 1..11: note = source = /note="Description of Artificial Sequence: Synthetic peptide"
RASQSISSYLN

SEQ ID NO: 1325 - protein, 16 aa, synthetic construct
  REGION 1..16: note = source = /note="Description of Artificial Sequence: Synthetic peptide"
RSSQSLLYSNGYNYVD

SEQ ID NO: 1326 - protein, 11 aa, synthetic construct
  REGION 1..11: note = source = /note="Description of Artificial Sequence: Synthetic peptide"
RASQSVSSNLA

SEQ ID NO: 1327 - protein, 11 aa, synthetic construct
  REGION 1..11: note = source = /note="Description of Artificial Sequence: Synthetic peptide"
RASQSVSSKLA

SEQ ID NO: 1328 - protein, 12 aa, synthetic construct
  REGION 1..12: note = source = /note="Description of Artificial Sequence: Synthetic peptide"
RASQSVGSTNLA

SEQ ID NO: 1329 - protein, 11 aa, synthetic construct
  REGION 1..11: note = source = /note="Description of Artificial Sequence: Synthetic peptide"
RASQSISSYLN

SEQ ID NO: 1330 - protein, 16 aa, synthetic construct
  REGION 1..16: note = source = /note="Description of Artificial Sequence: Synthetic peptide"
KSSESLVHNSGKTYLN

SEQ ID NO: 1331 - protein, 11 aa, synthetic construct
  REGION 1..11: note = source = /note="Description of Artificial Sequence: Synthetic peptide"
QASEDINKFLN

SEQ ID NO: 1332 - protein, 11 aa, synthetic construct
  REGION 1..11: note = source = /note="Description of Artificial Sequence: Synthetic peptide"
RASQSVGSNLA

SEQ ID NO: 1333 - protein, 12 aa, synthetic construct
  REGION 1..12: note = source = /note="Description of Artificial Sequence: Synthetic peptide"
RASQSIGSSSLA

SEQ ID NO: 1334 - protein, 11 aa, synthetic construct
  REGION 1..11: note = source = /note="Description of Artificial Sequence: Synthetic peptide"
KASQDIDDAMN

SEQ ID NO: 1335 - protein, 11 aa, synthetic construct
  REGION 1..11: note = source = /note="Description of Artificial Sequence: Synthetic peptide"
RASQDIYNNLA

SEQ ID NO: 1336 - protein, 16 aa, synthetic construct
  REGION 1..16: note = source = /note="Description of Artificial Sequence: Synthetic peptide"
RSSQSLLHSNGYNYLD

SEQ ID NO: 1337 - protein, 11 aa, synthetic construct
  REGION 1..11: note = source = /note="Description of Artificial Sequence: Synthetic peptide"
GGNNIGTKSVH

SEQ ID NO: 1338 - protein, 11 aa, synthetic construct
  REGION 1..11: note = source = /note="Description of Artificial Sequence: Synthetic peptide"
SGDGLSKKYVS

SEQ ID NO: 1339 - protein, 11 aa, synthetic construct
  REGION 1..11: note = source = /note="Description of Artificial Sequence: Synthetic peptide"
RASQGIRNWLA

SEQ ID NO: 1340 - protein, 11 aa, synthetic construct
  REGION 1..11: note = source = /note="Description of Artificial Sequence: Synthetic peptide"
GGNNIGSKSVH

SEQ ID NO: 1341 - protein, 11 aa, synthetic construct
  REGION 1..11: note = source = /note="Description of Artificial Sequence: Synthetic peptide"
QGDSLGNYYAT

SEQ ID NO: 1342 - protein, 12 aa, synthetic construct
  REGION 1..12: note = source = /note="Description of Artificial Sequence: Synthetic peptide"
RASQSVSSAYLA

SEQ ID NO: 1343 - protein, 11 aa, synthetic construct
  REGION 1..11: note = source = /note="Description of Artificial Sequence: Synthetic peptide"
RASQSVSNSLA

SEQ ID NO: 1344 - protein, 12 aa, synthetic construct
  REGION 1..12: note = source = /note="Description of Artificial Sequence: Synthetic peptide"
RASQSVSSSFLA

SEQ ID NO: 1345 - protein, 12 aa, synthetic construct
  REGION 1..12: note = source = /note="Description of Artificial Sequence: Synthetic peptide"
RASQSVSTTFLA

SEQ ID NO: 1346 - protein, 11 aa, synthetic construct
  REGION 1..11: note = source = /note="Description of Artificial Sequence: Synthetic peptide"
RASQSISSYLN

SEQ ID NO: 1347 - protein, 12 aa, synthetic construct
  REGION 1..12: note = source = /note="Description of Artificial Sequence: Synthetic peptide"
RATQSIGSSFLA

SEQ ID NO: 1348 - protein, 12 aa, synthetic construct
  REGION 1..12: note = source = /note="Description of Artificial Sequence: Synthetic peptide"
RASQSVSSSYLA

SEQ ID NO: 1349 - protein, 12 aa, synthetic construct
  REGION 1..12: note = source = /note="Description of Artificial Sequence: Synthetic peptide"
RASQSVSSSYLA

SEQ ID NO: 1350 - protein, 12 aa, synthetic construct
  REGION 1..12: note = source = /note="Description of Artificial Sequence: Synthetic peptide"
RASQRVASNYLA

SEQ ID NO: 1351 - protein, 12 aa, synthetic construct
  REGION 1..12: note = source = /note="Description of Artificial Sequence: Synthetic peptide"
RASQSLSSNFLA

SEQ ID NO: 1352 - protein, 16 aa, synthetic construct
  REGION 1..16: note = source = /note="Description of Artificial Sequence: Synthetic peptide"
RSSQSLLHSNGYNYLD

SEQ ID NO: 1353 - protein, 12 aa, synthetic construct
  REGION 1..12: note = source = /note="Description of Artificial Sequence: Synthetic peptide"
RASQSVSSSYLA

SEQ ID NO: 1354 - protein, 12 aa, synthetic construct
  REGION 1..12: note = source = /note="Description of Artificial Sequence: Synthetic peptide"
RASQSVASSFLA

SEQ ID NO: 1355 - protein, 11 aa, synthetic construct
  REGION 1..11: note = source = /note="Description of Artificial Sequence: Synthetic peptide"
RASQDVNTAVS

SEQ ID NO: 1356 - protein, 15 aa, synthetic construct
  REGION 1..15: note = source = /note="Description of Artificial Sequence: Synthetic peptide"
RASESVSVIGAHLIH

SEQ ID NO: 1357 - protein, 15 aa, synthetic construct
  REGION 1..15: note = source = /note="Description of Artificial Sequence: Synthetic peptide"
RASESVTILGSHLIY

SEQ ID NO: 1358 - protein, 15 aa, synthetic construct
  REGION 1..15: note = source = /note="Description of Artificial Sequence: Synthetic peptide"
RASESVTILGSHLIY

SEQ ID NO: 1359 - protein, 7 aa, synthetic construct
  REGION 1..7: note = source = /note="Description of Artificial Sequence: Synthetic peptide"
AASSLQS

SEQ ID NO: 1360 - protein, 7 aa, synthetic construct
  REGION 1..7: note = source = /note="Description of Artificial Sequence: Synthetic peptide"
GASRRAT

SEQ ID NO: 1361 - protein, 7 aa, synthetic construct
  REGION 1..7: note = source = /note="Description of Artificial Sequence: Synthetic peptide"
LGSNRAS

SEQ ID NO: 1362 - protein, 7 aa, synthetic construct
  REGION 1..7: note = source = /note="Description of Artificial Sequence: Synthetic peptide"
EVSNRFS

SEQ ID NO: 1363 - protein, 7 aa, synthetic construct
  REGION 1..7: note = source = /note="Description of Artificial Sequence: Synthetic peptide"
LGSKRAS

SEQ ID NO: 1364 - protein, 7 aa, synthetic construct
  REGION 1..7: note = source = /note="Description of Artificial Sequence: Synthetic peptide"
GASTLAS

SEQ ID NO: 1365 - protein, 7 aa, synthetic construct
  REGION 1..7: note = source = /note="Description of Artificial Sequence: Synthetic peptide"
LGSNRAS

SEQ ID NO: 1366 - protein, 7 aa, synthetic construct
  REGION 1..7: note = source = /note="Description of Artificial Sequence: Synthetic peptide"
GASTRAS

SEQ ID NO: 1367 - protein, 7 aa, synthetic construct
  REGION 1..7: note = source = /note="Description of Artificial Sequence: Synthetic peptide"
GASIRAT

SEQ ID NO: 1368 - protein, 7 aa, synthetic construct
  REGION 1..7: note = source = /note="Description of Artificial Sequence: Synthetic peptide"
DASNRAT

SEQ ID NO: 1369 - protein, 7 aa, synthetic construct
  REGION 1..7: note = source = /note="Description of Artificial Sequence: Synthetic peptide"
AASSLQS

SEQ ID NO: 1370 - protein, 7 aa, synthetic construct
  REGION 1..7: note = source = /note="Description of Artificial Sequence: Synthetic peptide"
EVSNRDS

SEQ ID NO: 1371 - protein, 7 aa, synthetic construct
  REGION 1..7: note = source = /note="Description of Artificial Sequence: Synthetic peptide"
DASTLQT

SEQ ID NO: 1372 - protein, 7 aa, synthetic construct
  REGION 1..7: note = source = /note="Description of Artificial Sequence: Synthetic peptide"
GASTRAT

SEQ ID NO: 1373 - protein, 7 aa, synthetic construct
  REGION 1..7: note = source = /note="Description of Artificial Sequence: Synthetic peptide"
GASSRAS

SEQ ID NO: 1374 - protein, 7 aa, synthetic construct
  REGION 1..7: note = source = /note="Description of Artificial Sequence: Synthetic peptide"
SATSPVP

SEQ ID NO: 1375 - protein, 7 aa, synthetic construct
  REGION 1..7: note = source = /note="Description of Artificial Sequence: Synthetic peptide"
AANKSQS

SEQ ID NO: 1376 - protein, 7 aa, synthetic construct
  REGION 1..7: note = source = /note="Description of Artificial Sequence: Synthetic peptide"
LGSNRAS

SEQ ID NO: 1377 - protein, 7 aa, synthetic construct
  REGION 1..7: note = source = /note="Description of Artificial Sequence: Synthetic peptide"
DDSVRPS

SEQ ID NO: 1378 - protein, 7 aa, synthetic construct
  REGION 1..7: note = source = /note="Description of Artificial Sequence: Synthetic peptide"
RDKERPS

SEQ ID NO: 1379 - protein, 7 aa, synthetic construct
  REGION 1..7: note = source = /note="Description of Artificial Sequence: Synthetic peptide"
AASNLQS

SEQ ID NO: 1380 - protein, 7 aa, synthetic construct
  REGION 1..7: note = source = /note="Description of Artificial Sequence: Synthetic peptide"
GKNNRPS

SEQ ID NO: 1381 - protein, 7 aa, synthetic construct
  REGION 1..7: note = source = /note="Description of Artificial Sequence: Synthetic peptide"
GTNNRPS

SEQ ID NO: 1382 - protein, 7 aa, synthetic construct
  REGION 1..7: note = source = /note="Description of Artificial Sequence: Synthetic peptide"
GASTRAT

SEQ ID NO: 1383 - protein, 7 aa, synthetic construct
  REGION 1..7: note = source = /note="Description of Artificial Sequence: Synthetic peptide"
DASSRAT

SEQ ID NO: 1384 - protein, 7 aa, synthetic construct
  REGION 1..7: note = source = /note="Description of Artificial Sequence: Synthetic peptide"
GASSRAT

SEQ ID NO: 1385 - protein, 7 aa, synthetic construct
  REGION 1..7: note = source = /note="Description of Artificial Sequence: Synthetic peptide"
GSSNRAT

SEQ ID NO: 1386 - protein, 7 aa, synthetic construct
  REGION 1..7: note = source = /note="Description of Artificial Sequence: Synthetic peptide"
AASSLQS

SEQ ID NO: 1387 - protein, 7 aa, synthetic construct
  REGION 1..7: note = source = /note="Description of Artificial Sequence: Synthetic peptide"
GASQRAT

SEQ ID NO: 1388 - protein, 7 aa, synthetic construct
  REGION 1..7: note = source = /note="Description of Artificial Sequence: Synthetic peptide"
GASSRAT

SEQ ID NO: 1389 - protein, 7 aa, synthetic construct
  REGION 1..7: note = source = /note="Description of Artificial Sequence: Synthetic peptide"
GASSRAT

SEQ ID NO: 1390 - protein, 7 aa, synthetic construct
  REGION 1..7: note = source = /note="Description of Artificial Sequence: Synthetic peptide"
GASSRAT

SEQ ID NO: 1391 - protein, 7 aa, synthetic construct
  REGION 1..7: note = source = /note="Description of Artificial Sequence: Synthetic peptide"
GASNWAT

SEQ ID NO: 1392 - protein, 7 aa, synthetic construct
  REGION 1..7: note = source = /note="Description of Artificial Sequence: Synthetic peptide"
LGSNRAS

SEQ ID NO: 1393 - protein, 7 aa, synthetic construct
  REGION 1..7: note = source = /note="Description of Artificial Sequence: Synthetic peptide"
GTSSRAT

SEQ ID NO: 1394 - protein, 7 aa, synthetic construct
  REGION 1..7: note = source = /note="Description of Artificial Sequence: Synthetic peptide"
GASGRAT

SEQ ID NO: 1395 - protein, 7 aa, synthetic construct
  REGION 1..7: note = source = /note="Description of Artificial Sequence: Synthetic peptide"
SASYRYT

SEQ ID NO: 1396 - protein, 7 aa, synthetic construct
  REGION 1..7: note = source = /note="Description of Artificial Sequence: Synthetic peptide"
LASNLET

SEQ ID NO: 1397 - protein, 7 aa, synthetic construct
  REGION 1..7: note = source = /note="Description of Artificial Sequence: Synthetic peptide"
LASNVQT

SEQ ID NO: 1398 - protein, 7 aa, synthetic construct
  REGION 1..7: note = source = /note="Description of Artificial Sequence: Synthetic peptide"
LASNVQT

SEQ ID NO: 1399 - protein, 9 aa, synthetic construct
  REGION 1..9: note = source = /note="Description of Artificial Sequence: Synthetic peptide"
QQSYSTPYT

SEQ ID NO: 1400 - protein, 10 aa, synthetic construct
  REGION 1..10: note = source = /note="Description of Artificial Sequence: Synthetic peptide"
QQYHSSPSWT

SEQ ID NO: 1401 - protein, 9 aa, synthetic construct
  REGION 1..9: note = source = /note="Description of Artificial Sequence: Synthetic peptide"
MQALQTPYT

SEQ ID NO: 1402 - protein, 8 aa, synthetic construct
  REGION 1..8: note = source = /note="Description of Artificial Sequence: Synthetic peptide"
MQNIQFPS

SEQ ID NO: 1403 - protein, 9 aa, synthetic construct
  REGION 1..9: note = source = /note="Description of Artificial Sequence: Synthetic peptide"
MQALQTPYT

SEQ ID NO: 1404 - protein, 8 aa, synthetic construct
  REGION 1..8: note = source = /note="Description of Artificial Sequence: Synthetic peptide"
QQSYKRAS

SEQ ID NO: 1405 - protein, 9 aa, synthetic construct
  REGION 1..9: note = source = /note="Description of Artificial Sequence: Synthetic peptide"
MQGRQFPYS

SEQ ID NO: 1406 - protein, 8 aa, synthetic construct
  REGION 1..8: note = source = /note="Description of Artificial Sequence: Synthetic peptide"
QQYGSSLT

SEQ ID NO: 1407 - protein, 9 aa, synthetic construct
  REGION 1..9: note = source = /note="Description of Artificial Sequence: Synthetic peptide"
QQYGSSSWT

SEQ ID NO: 1408 - protein, 10 aa, synthetic construct
  REGION 1..10: note = source = /note="Description of Artificial Sequence: Synthetic peptide"
QQYGSSPPWT

SEQ ID NO: 1409 - protein, 7 aa, synthetic construct
  REGION 1..7: note = source = /note="Description of Artificial Sequence: Synthetic peptide"
QQSYTLA

SEQ ID NO: 1410 - protein, 9 aa, synthetic construct
  REGION 1..9: note = source = /note="Description of Artificial Sequence: Synthetic peptide"
MQGTHWPGT

SEQ ID NO: 1411 - protein, 9 aa, synthetic construct
  REGION 1..9: note = source = /note="Description of Artificial Sequence: Synthetic peptide"
QQYESLPLT

SEQ ID NO: 1412 - protein, 10 aa, synthetic construct
  REGION 1..10: note = source = /note="Description of Artificial Sequence: Synthetic peptide"
QQYNDWLPVT

SEQ ID NO: 1413 - protein, 10 aa, synthetic construct
  REGION 1..10: note = source = /note="Description of Artificial Sequence: Synthetic peptide"
QQYAGSPPFT

SEQ ID NO: 1414 - protein, 9 aa, synthetic construct
  REGION 1..9: note = source = /note="Description of Artificial Sequence: Synthetic peptide"
LQHDNFPLT

SEQ ID NO: 1415 - protein, 9 aa, synthetic construct
  REGION 1..9: note = source = /note="Description of Artificial Sequence: Synthetic peptide"
QHYYRFPYS

SEQ ID NO: 1416 - protein, 9 aa, synthetic construct
  REGION 1..9: note = source = /note="Description of Artificial Sequence: Synthetic peptide"
MQALQTPYT

SEQ ID NO: 1417 - protein, 11 aa, synthetic construct
  REGION 1..11: note = source = /note="Description of Artificial Sequence: Synthetic peptide"
QVWDSDSEHVV

SEQ ID NO: 1418 - protein, 9 aa, synthetic construct
  REGION 1..9: note = source = /note="Description of Artificial Sequence: Synthetic peptide"
QAWDDTTVV

SEQ ID NO: 1419 - protein, 9 aa, synthetic construct
  REGION 1..9: note = source = /note="Description of Artificial Sequence: Synthetic peptide"
QKYNSAPFT

SEQ ID NO: 1420 - protein, 12 aa, synthetic construct
  REGION 1..12: note = source = /note="Description of Artificial Sequence: Synthetic peptide"
SSRDSSGDHLRV

SEQ ID NO: 1421 - protein, 11 aa, synthetic construct
  REGION 1..11: note = source = /note="Description of Artificial Sequence: Synthetic peptide"
NSRDSSGHHLL

SEQ ID NO: 1422 - protein, 14 aa, synthetic construct
  REGION 1..14: note = source = /note="Description of Artificial Sequence: Synthetic peptide"
QHYGSSFNGSSLFT

SEQ ID NO: 1423 - protein, 10 aa, synthetic construct
  REGION 1..10: note = source = /note="Description of Artificial Sequence: Synthetic peptide"
QQFGTSSGLT

SEQ ID NO: 1424 - protein, 10 aa, synthetic construct
  REGION 1..10: note = source = /note="Description of Artificial Sequence: Synthetic peptide"
QQYHSSPSWT

SEQ ID NO: 1425 - protein, 10 aa, synthetic construct
  REGION 1..10: note = source = /note="Description of Artificial Sequence: Synthetic peptide"
QQYHSSPSWT

SEQ ID NO: 1426 - protein, 9 aa, synthetic construct
  REGION 1..9: note = source = /note="Description of Artificial Sequence: Synthetic peptide"
QQSYSTPYS

SEQ ID NO: 1427 - protein, 10 aa, synthetic construct
  REGION 1..10: note = source = /note="Description of Artificial Sequence: Synthetic peptide"
QHYESSPSWT

SEQ ID NO: 1428 - protein, 10 aa, synthetic construct
  REGION 1..10: note = source = /note="Description of Artificial Sequence: Synthetic peptide"
QQYGSPPRFT

SEQ ID NO: 1429 - protein, 10 aa, synthetic construct
  REGION 1..10: note = source = /note="Description of Artificial Sequence: Synthetic peptide"
QHYGSSPSWT

SEQ ID NO: 1430 - protein, 10 aa, synthetic construct
  REGION 1..10: note = source = /note="Description of Artificial Sequence: Synthetic peptide"
QHYDSSPSWT

SEQ ID NO: 1431 - protein, 10 aa, synthetic construct
  REGION 1..10: note = source = /note="Description of Artificial Sequence: Synthetic peptide"
QYYGTSPMYT

SEQ ID NO: 1432 - protein, 9 aa, synthetic construct
  REGION 1..9: note = source = /note="Description of Artificial Sequence: Synthetic peptide"
MQALQTPLT

SEQ ID NO: 1433 - protein, 11 aa, synthetic construct
  REGION 1..11: note = source = /note="Description of Artificial Sequence: Synthetic peptide"
QHYGNSPPKFT

SEQ ID NO: 1434 - protein, 10 aa, synthetic construct
  REGION 1..10: note = source = /note="Description of Artificial Sequence: Synthetic peptide"
QHYGGSPRLT

SEQ ID NO: 1435 - protein, 9 aa, synthetic construct
  REGION 1..9: note = source = /note="Description of Artificial Sequence: Synthetic peptide"
QQHYSTPWT

SEQ ID NO: 1436 - protein, 9 aa, synthetic construct
  REGION 1..9: note = source = /note="Description of Artificial Sequence: Synthetic peptide"
LQSRIFPRT

SEQ ID NO: 1437 - protein, 9 aa, synthetic construct
  REGION 1..9: note = source = /note="Description of Artificial Sequence: Synthetic peptide"
LQSRTIPRT

SEQ ID NO: 1438 - protein, 9 aa, synthetic construct
  REGION 1..9: note = source = /note="Description of Artificial Sequence: Synthetic peptide"
LQSRTIPRT

SEQ ID NO: 1439 - protein, 7 aa, synthetic construct
  REGION 1..7: note = source = /note="Description of Artificial Sequence: Synthetic peptide"
GFALSNH

SEQ ID NO: 1440 - protein, 7 aa, synthetic construct
  REGION 1..7: note = source = /note="Description of Artificial Sequence: Synthetic peptide"
GFTFSNY

SEQ ID NO: 1441 - protein, 7 aa, synthetic construct
  REGION 1..7: note = source = /note="Description of Artificial Sequence: Synthetic peptide"
GFTFDDY

SEQ ID NO: 1442 - protein, 7 aa, synthetic construct
  REGION 1..7: note = source = /note="Description of Artificial Sequence: Synthetic peptide"
GFALSNH

SEQ ID NO: 1443 - protein, 7 aa, synthetic construct
  REGION 1..7: note = source = /note="Description of Artificial Sequence: Synthetic peptide"
GYIFDNF

SEQ ID NO: 1444 - protein, 7 aa, synthetic construct
  REGION 1..7: note = source = /note="Description of Artificial Sequence: Synthetic peptide"
GFTFSSD

SEQ ID NO: 1445 - protein, 7 aa, synthetic construct
  REGION 1..7: note = source = /note="Description of Artificial Sequence: Synthetic peptide"
GYTFSNY

SEQ ID NO: 1446 - protein, 7 aa, synthetic construct
  REGION 1..7: note = source = /note="Description of Artificial Sequence: Synthetic peptide"
GFALSNH

SEQ ID NO: 1447 - protein, 7 aa, synthetic construct
  REGION 1..7: note = source = /note="Description of Artificial Sequence: Synthetic peptide"
GFALSNH

SEQ ID NO: 1448 - protein, 7 aa, synthetic construct
  REGION 1..7: note = source = /note="Description of Artificial Sequence: Synthetic peptide"
GFALSNH

SEQ ID NO: 1449 - protein, 7 aa, synthetic construct
  REGION 1..7: note = source = /note="Description of Artificial Sequence: Synthetic peptide"
GFTFSDY

SEQ ID NO: 1450 - protein, 7 aa, synthetic construct
  REGION 1..7: note = source = /note="Description of Artificial Sequence: Synthetic peptide"
GFTFSDY

SEQ ID NO: 1451 - protein, 7 aa, synthetic construct
  REGION 1..7: note = source = /note="Description of Artificial Sequence: Synthetic peptide"
GFALSNH

SEQ ID NO: 1452 - protein, 7 aa, synthetic construct
  REGION 1..7: note = source = /note="Description of Artificial Sequence: Synthetic peptide"
GFALSNH

SEQ ID NO: 1453 - protein, 7 aa, synthetic construct
  REGION 1..7: note = source = /note="Description of Artificial Sequence: Synthetic peptide"
GFALSNH

SEQ ID NO: 1454 - protein, 9 aa, synthetic construct
  REGION 1..9: note = source = /note="Description of Artificial Sequence: Synthetic peptide"
GGSISSSYY

SEQ ID NO: 1455 - protein, 9 aa, synthetic construct
  REGION 1..9: note = source = /note="Description of Artificial Sequence: Synthetic peptide"
GFSLRTSGM

SEQ ID NO: 1456 - protein, 7 aa, synthetic construct
  REGION 1..7: note = source = /note="Description of Artificial Sequence: Synthetic peptide"
GFTFSSY

SEQ ID NO: 1457 - protein, 7 aa, synthetic construct
  REGION 1..7: note = source = /note="Description of Artificial Sequence: Synthetic peptide"
GFTFSDY

SEQ ID NO: 1458 - protein, 7 aa, synthetic construct
  REGION 1..7: note = source = /note="Description of Artificial Sequence: Synthetic peptide"
GYTVTSH

SEQ ID NO: 1459 - protein, 9 aa, synthetic construct
  REGION 1..9: note = source = /note="Description of Artificial Sequence: Synthetic peptide"
GGSISSGGY

SEQ ID NO: 1460 - protein, 7 aa, synthetic construct
  REGION 1..7: note = source = /note="Description of Artificial Sequence: Synthetic peptide"
GGTFSSY

SEQ ID NO: 1461 - protein, 9 aa, synthetic construct
  REGION 1..9: note = source = /note="Description of Artificial Sequence: Synthetic peptide"
GDSVSSNSA

SEQ ID NO: 1462 - protein, 7 aa, synthetic construct
  REGION 1..7: note = source = /note="Description of Artificial Sequence: Synthetic peptide"
GFTFSSY

SEQ ID NO: 1463 - protein, 7 aa, synthetic construct
  REGION 1..7: note = source = /note="Description of Artificial Sequence: Synthetic peptide"
GITFSRY

SEQ ID NO: 1464 - protein, 7 aa, synthetic construct
  REGION 1..7: note = source = /note="Description of Artificial Sequence: Synthetic peptide"
GFTFSSY

SEQ ID NO: 1465 - protein, 7 aa, synthetic construct
  REGION 1..7: note = source = /note="Description of Artificial Sequence: Synthetic peptide"
GFTFSSY

SEQ ID NO: 1466 - protein, 7 aa, synthetic construct
  REGION 1..7: note = source = /note="Description of Artificial Sequence: Synthetic peptide"
GFTFDDY

SEQ ID NO: 1467 - protein, 7 aa, synthetic construct
  REGION 1..7: note = source = /note="Description of Artificial Sequence: Synthetic peptide"
GFTFDDY

SEQ ID NO: 1468 - protein, 7 aa, synthetic construct
  REGION 1..7: note = source = /note="Description of Artificial Sequence: Synthetic peptide"
GFTFSSY

SEQ ID NO: 1469 - protein, 7 aa, synthetic construct
  REGION 1..7: note = source = /note="Description of Artificial Sequence: Synthetic peptide"
GFTFSSY

SEQ ID NO: 1470 - protein, 7 aa, synthetic construct
  REGION 1..7: note = source = /note="Description of Artificial Sequence: Synthetic peptide"
GFTFSSY

SEQ ID NO: 1471 - protein, 7 aa, synthetic construct
  REGION 1..7: note = source = /note="Description of Artificial Sequence: Synthetic peptide"
GFSFSSY

SEQ ID NO: 1472 - protein, 7 aa, synthetic construct
  REGION 1..7: note = source = /note="Description of Artificial Sequence: Synthetic peptide"
GFTFSSY

SEQ ID NO: 1473 - protein, 7 aa, synthetic construct
  REGION 1..7: note = source = /note="Description of Artificial Sequence: Synthetic peptide"
GFTFSSY

SEQ ID NO: 1474 - protein, 7 aa, synthetic construct
  REGION 1..7: note = source = /note="Description of Artificial Sequence: Synthetic peptide"
GFTFSSY

SEQ ID NO: 1475 - protein, 7 aa, synthetic construct
  REGION 1..7: note = source = /note="Description of Artificial Sequence: Synthetic peptide"
GYTFTNF

SEQ ID NO: 1476 - protein, 7 aa, synthetic construct
  REGION 1..7: note = source = /note="Description of Artificial Sequence: Synthetic peptide"
GYTFTDY

SEQ ID NO: 1477 - protein, 7 aa, synthetic construct
  REGION 1..7: note = source = /note="Description of Artificial Sequence: Synthetic peptide"
GYTFRHY

SEQ ID NO: 1478 - protein, 7 aa, synthetic construct
  REGION 1..7: note = source = /note="Description of Artificial Sequence: Synthetic peptide"
GYTFTHY

SEQ ID NO: 1479 - protein, 5 aa, synthetic construct
  REGION 1..5: note = source = /note="Description of Artificial Sequence: Synthetic peptide"
VYSGS

SEQ ID NO: 1480 - protein, 6 aa, synthetic construct
  REGION 1..6: note = source = /note="Description of Artificial Sequence: Synthetic peptide"
SRSGEN

SEQ ID NO: 1481 - protein, 6 aa, synthetic construct
  REGION 1..6: note = source = /note="Description of Artificial Sequence: Synthetic peptide"
SWNSGS

SEQ ID NO: 1482 - protein, 5 aa, synthetic construct
  REGION 1..5: note = source = /note="Description of Artificial Sequence: Synthetic peptide"
VYSGS

SEQ ID NO: 1483 - protein, 6 aa, synthetic construct
  REGION 1..6: note = source = /note="Description of Artificial Sequence: Synthetic peptide"
NPKNNN

SEQ ID NO: 1484 - protein, 6 aa, synthetic construct
  REGION 1..6: note = source = /note="Description of Artificial Sequence: Synthetic peptide"
SGSGGT

SEQ ID NO: 1485 - protein, 6 aa, synthetic construct
  REGION 1..6: note = source = /note="Description of Artificial Sequence: Synthetic peptide"
SAYNGN

SEQ ID NO: 1486 - protein, 5 aa, synthetic construct
  REGION 1..5: note = source = /note="Description of Artificial Sequence: Synthetic peptide"
VYSGS

SEQ ID NO: 1487 - protein, 5 aa, synthetic construct
  REGION 1..5: note = source = /note="Description of Artificial Sequence: Synthetic peptide"
VYSGS

SEQ ID NO: 1488 - protein, 5 aa, synthetic construct
  REGION 1..5: note = source = /note="Description of Artificial Sequence: Synthetic peptide"
VYSGS

SEQ ID NO: 1489 - protein, 6 aa, synthetic construct
  REGION 1..6: note = source = /note="Description of Artificial Sequence: Synthetic peptide"
SSSGST

SEQ ID NO: 1490 - protein, 6 aa, synthetic construct
  REGION 1..6: note = source = /note="Description of Artificial Sequence: Synthetic peptide"
SSSGNT

SEQ ID NO: 1491 - protein, 5 aa, synthetic construct
  REGION 1..5: note = source = /note="Description of Artificial Sequence: Synthetic peptide"
VYSGS

SEQ ID NO: 1492 - protein, 5 aa, synthetic construct
  REGION 1..5: note = source = /note="Description of Artificial Sequence: Synthetic peptide"
VYSGS

SEQ ID NO: 1493 - protein, 5 aa, synthetic construct
  REGION 1..5: note = source = /note="Description of Artificial Sequence: Synthetic peptide"
VYSGS

SEQ ID NO: 1494 - protein, 5 aa, synthetic construct
  REGION 1..5: note = source = /note="Description of Artificial Sequence: Synthetic peptide"
YYSGS

SEQ ID NO: 1495 - protein, 5 aa, synthetic construct
  REGION 1..5: note = source = /note="Description of Artificial Sequence: Synthetic peptide"
DWDED

SEQ ID NO: 1496 - protein, 6 aa, synthetic construct
  REGION 1..6: note = source = /note="Description of Artificial Sequence: Synthetic peptide"
SSSSSY

SEQ ID NO: 1497 - protein, 6 aa, synthetic construct
  REGION 1..6: note = source = /note="Description of Artificial Sequence: Synthetic peptide"
SSSGST

SEQ ID NO: 1498 - protein, 6 aa, synthetic construct
  REGION 1..6: note = source = /note="Description of Artificial Sequence: Synthetic peptide"
NPSGGV

SEQ ID NO: 1499 - protein, 5 aa, synthetic construct
  REGION 1..5: note = source = /note="Description of Artificial Sequence: Synthetic peptide"
YYSGS

SEQ ID NO: 1500 - protein, 6 aa, synthetic construct
  REGION 1..6: note = source = /note="Description of Artificial Sequence: Synthetic peptide"
IPIFGT

SEQ ID NO: 1501 - protein, 7 aa, synthetic construct
  REGION 1..7: note = source = /note="Description of Artificial Sequence: Synthetic peptide"
YYRSKWY

SEQ ID NO: 1502 - protein, 6 aa, synthetic construct
  REGION 1..6: note = source = /note="Description of Artificial Sequence: Synthetic peptide"
SGSGGS

SEQ ID NO: 1503 - protein, 6 aa, synthetic construct
  REGION 1..6: note = source = /note="Description of Artificial Sequence: Synthetic peptide"
SDSGVS

SEQ ID NO: 1504 - protein, 6 aa, synthetic construct
  REGION 1..6: note = source = /note="Description of Artificial Sequence: Synthetic peptide"
SGSGGS

SEQ ID NO: 1505 - protein, 6 aa, synthetic construct
  REGION 1..6: note = source = /note="Description of Artificial Sequence: Synthetic peptide"
SGSGGS

SEQ ID NO: 1506 - protein, 6 aa, synthetic construct
  REGION 1..6: note = source = /note="Description of Artificial Sequence: Synthetic peptide"
SWNSGS

SEQ ID NO: 1507 - protein, 6 aa, synthetic construct
  REGION 1..6: note = source = /note="Description of Artificial Sequence: Synthetic peptide"
NWKGNS

SEQ ID NO: 1508 - protein, 6 aa, synthetic construct
  REGION 1..6: note = source = /note="Description of Artificial Sequence: Synthetic peptide"
SGSGGS

SEQ ID NO: 1509 - protein, 6 aa, synthetic construct
  REGION 1..6: note = source = /note="Description of Artificial Sequence: Synthetic peptide"
SGSGGS

SEQ ID NO: 1510 - protein, 6 aa, synthetic construct
  REGION 1..6: note = source = /note="Description of Artificial Sequence: Synthetic peptide"
SGSGGS

SEQ ID NO: 1511 - protein, 6 aa, synthetic construct
  REGION 1..6: note = source = /note="Description of Artificial Sequence: Synthetic peptide"
SGSGGS

SEQ ID NO: 1512 - protein, 6 aa, synthetic construct
  REGION 1..6: note = source = /note="Description of Artificial Sequence: Synthetic peptide"
SGSGGS

SEQ ID NO: 1513 - protein, 6 aa, synthetic construct
  REGION 1..6: note = source = /note="Description of Artificial Sequence: Synthetic peptide"
SGSGGS

SEQ ID NO: 1514 - protein, 6 aa, synthetic construct
  REGION 1..6: note = source = /note="Description of Artificial Sequence: Synthetic peptide"
SGSGGS

SEQ ID NO: 1515 - protein, 6 aa, synthetic construct
  REGION 1..6: note = source = /note="Description of Artificial Sequence: Synthetic peptide"
NTYTGE

SEQ ID NO: 1516 - protein, 6 aa, synthetic construct
  REGION 1..6: note = source = /note="Description of Artificial Sequence: Synthetic peptide"
NTETRE

SEQ ID NO: 1517 - protein, 6 aa, synthetic construct
  REGION 1..6: note = source = /note="Description of Artificial Sequence: Synthetic peptide"
NTESGV

SEQ ID NO: 1518 - protein, 6 aa, synthetic construct
  REGION 1..6: note = source = /note="Description of Artificial Sequence: Synthetic peptide"
NTETGE

SEQ ID NO: 1519 - protein, 7 aa, synthetic construct
  REGION 1..7: note = source = /note="Description of Artificial Sequence: Synthetic peptide"
HGGESDV

SEQ ID NO: 1520 - protein, 11 aa, synthetic construct
  REGION 1..11: note = source = /note="Description of Artificial Sequence: Synthetic peptide"
SPAHYYGGMDV

SEQ ID NO: 1521 - protein, 6 aa, synthetic construct
  REGION 1..6: note = source = /note="Description of Artificial Sequence: Synthetic peptide"
HSFLAY

SEQ ID NO: 1522 - protein, 7 aa, synthetic construct
  REGION 1..7: note = source = /note="Description of Artificial Sequence: Synthetic peptide"
HGGESDV

SEQ ID NO: 1523 - protein, 11 aa, synthetic construct
  REGION 1..11: note = source = /note="Description of Artificial Sequence: Synthetic peptide"
GPYYYQSYMDV

SEQ ID NO: 1524 - protein, 14 aa, synthetic construct
  REGION 1..14: note = source = /note="Description of Artificial Sequence: Synthetic peptide"
LDSSGYYYARGPRY

SEQ ID NO: 1525 - protein, 9 aa, synthetic construct
  REGION 1..9: note = source = /note="Description of Artificial Sequence: Synthetic peptide"
GPYYYYMDV

SEQ ID NO: 1526 - protein, 7 aa, synthetic construct
  REGION 1..7: note = source = /note="Description of Artificial Sequence: Synthetic peptide"
HGGESDV

SEQ ID NO: 1527 - protein, 7 aa, synthetic construct
  REGION 1..7: note = source = /note="Description of Artificial Sequence: Synthetic peptide"
HGGESDV

SEQ ID NO: 1528 - protein, 7 aa, synthetic construct
  REGION 1..7: note = source = /note="Description of Artificial Sequence: Synthetic peptide"
HGGESDV

SEQ ID NO: 1529 - protein, 8 aa, synthetic construct
  REGION 1..8: note = source = /note="Description of Artificial Sequence: Synthetic peptide"
ESGDGMDV

SEQ ID NO: 1530 - protein, 8 aa, synthetic construct
  REGION 1..8: note = source = /note="Description of Artificial Sequence: Synthetic peptide"
STMVREDY

SEQ ID NO: 1531 - protein, 7 aa, synthetic construct
  REGION 1..7: note = source = /note="Description of Artificial Sequence: Synthetic peptide"
HGGESDV

SEQ ID NO: 1532 - protein, 7 aa, synthetic construct
  REGION 1..7: note = source = /note="Description of Artificial Sequence: Synthetic peptide"
HGGESDV

SEQ ID NO: 1533 - protein, 7 aa, synthetic construct
  REGION 1..7: note = source = /note="Description of Artificial Sequence: Synthetic peptide"
HGGESDV

SEQ ID NO: 1534 - protein, 11 aa, synthetic construct
  REGION 1..11: note = source = /note="Description of Artificial Sequence: Synthetic peptide"
HWQEWPDAFDI

SEQ ID NO: 1535 - protein, 13 aa, synthetic construct
  REGION 1..13: note = source = /note="Description of Artificial Sequence: Synthetic peptide"
SGAGGTSATAFDI

SEQ ID NO: 1536 - protein, 10 aa, synthetic construct
  REGION 1..10: note = source = /note="Description of Artificial Sequence: Synthetic peptide"
TIAAVYAFDI

SEQ ID NO: 1537 - protein, 8 aa, synthetic construct
  REGION 1..8: note = source = /note="Description of Artificial Sequence: Synthetic peptide"
DLRGAFDI

SEQ ID NO: 1538 - protein, 11 aa, synthetic construct
  REGION 1..11: note = source = /note="Description of Artificial Sequence: Synthetic peptide"
EGSGSGWYFDF

SEQ ID NO: 1539 - protein, 13 aa, synthetic construct
  REGION 1..13: note = source = /note="Description of Artificial Sequence: Synthetic peptide"
AGIAARLRGAFDI

SEQ ID NO: 1540 - protein, 20 aa, synthetic construct
  REGION 1..20: note = source = /note="Description of Artificial Sequence: Synthetic peptide"
RGGYQLLRWDVGLLRSAFDI

SEQ ID NO: 1541 - protein, 13 aa, synthetic construct
  REGION 1..13: note = source = /note="Description of Artificial Sequence: Synthetic peptide"
SSPEGLFLYWFDP

SEQ ID NO: 1542 - protein, 9 aa, synthetic construct
  REGION 1..9: note = source = /note="Description of Artificial Sequence: Synthetic peptide"
VEGSGSLDY

SEQ ID NO: 1543 - protein, 9 aa, synthetic construct
  REGION 1..9: note = source = /note="Description of Artificial Sequence: Synthetic peptide"
RAGSEASDI

SEQ ID NO: 1544 - protein, 15 aa, synthetic construct
  REGION 1..15: note = source = /note="Description of Artificial Sequence: Synthetic peptide"
ATYKRELRYYYGMDV

SEQ ID NO: 1545 - protein, 15 aa, synthetic construct
  REGION 1..15: note = source = /note="Description of Artificial Sequence: Synthetic peptide"
ATYKRELRYYYGMDV

SEQ ID NO: 1546 - protein, 8 aa, synthetic construct
  REGION 1..8: note = source = /note="Description of Artificial Sequence: Synthetic peptide"
VGKAVPDV

SEQ ID NO: 1547 - protein, 13 aa, synthetic construct
  REGION 1..13: note = source = /note="Description of Artificial Sequence: Synthetic peptide"
HQGVAYYNYAMDV

SEQ ID NO: 1548 - protein, 8 aa, synthetic construct
  REGION 1..8: note = source = /note="Description of Artificial Sequence: Synthetic peptide"
VVRDGMDV

SEQ ID NO: 1549 - protein, 9 aa, synthetic construct
  REGION 1..9: note = source = /note="Description of Artificial Sequence: Synthetic peptide"
IPQTGTFDY

SEQ ID NO: 1550 - protein, 15 aa, synthetic construct
  REGION 1..15: note = source = /note="Description of Artificial Sequence: Synthetic peptide"
ANYKRELRYYYGMDV

SEQ ID NO: 1551 - protein, 11 aa, synthetic construct
  REGION 1..11: note = source = /note="Description of Artificial Sequence: Synthetic peptide"
ALVGATGAFDI

SEQ ID NO: 1552 - protein, 8 aa, synthetic construct
  REGION 1..8: note = source = /note="Description of Artificial Sequence: Synthetic peptide"
WFGEGFDP

SEQ ID NO: 1553 - protein, 17 aa, synthetic construct
  REGION 1..17: note = source = /note="Description of Artificial Sequence: Synthetic peptide"
VGYDSSGYYRDYYGMDV

SEQ ID NO: 1554 - protein, 13 aa, synthetic construct
  REGION 1..13: note = source = /note="Description of Artificial Sequence: Synthetic peptide"
MGWSSGYLGAFDI

SEQ ID NO: 1555 - protein, 13 aa, synthetic construct
  REGION 1..13: note = source = /note="Description of Artificial Sequence: Synthetic peptide"
GEIYYGYDGGFAY

SEQ ID NO: 1556 - protein, 8 aa, synthetic construct
  REGION 1..8: note = source = /note="Description of Artificial Sequence: Synthetic peptide"
DYSYAMDY

SEQ ID NO: 1557 - protein, 8 aa, synthetic construct
  REGION 1..8: note = source = /note="Description of Artificial Sequence: Synthetic peptide"
DYLYSLDF

SEQ ID NO: 1558 - protein, 8 aa, synthetic construct
  REGION 1..8: note = source = /note="Description of Artificial Sequence: Synthetic peptide"
DYLYSCDY

SEQ ID NO: 1559 - protein, 7 aa, synthetic construct
  REGION 1..7: note = source = /note="Description of Artificial Sequence: Synthetic peptide"
SQSISSY

SEQ ID NO: 1560 - protein, 8 aa, synthetic construct
  REGION 1..8: note = source = /note="Description of Artificial Sequence: Synthetic peptide"
SQSISSSF

SEQ ID NO: 1561 - protein, 12 aa, synthetic construct
  REGION 1..12: note = source = /note="Description of Artificial Sequence: Synthetic peptide"
SQSLLHSNGYNY

SEQ ID NO: 1562 - protein, 12 aa, synthetic construct
  REGION 1..12: note = source = /note="Description of Artificial Sequence: Synthetic peptide"
SQSLLRNDGKTP

SEQ ID NO: 1563 - protein, 12 aa, synthetic construct
  REGION 1..12: note = source = /note="Description of Artificial Sequence: Synthetic peptide"
SQSLLHSNGYNY

SEQ ID NO: 1564 - protein, 7 aa, synthetic construct
  REGION 1..7: note = source = /note="Description of Artificial Sequence: Synthetic peptide"
SQSISSY

SEQ ID NO: 1565 - protein, 12 aa, synthetic construct
  REGION 1..12: note = source = /note="Description of Artificial Sequence: Synthetic peptide"
SQSLLYSNGYNY

SEQ ID NO: 1566 - protein, 7 aa, synthetic construct
  REGION 1..7: note = source = /note="Description of Artificial Sequence: Synthetic peptide"
SQSVSSN

SEQ ID NO: 1567 - protein, 7 aa, synthetic construct
  REGION 1..7: note = source = /note="Description of Artificial Sequence: Synthetic peptide"
SQSVSSK

SEQ ID NO: 1568 - protein, 8 aa, synthetic construct
  REGION 1..8: note = source = /note="Description of Artificial Sequence: Synthetic peptide"
SQSVGSTN

SEQ ID NO: 1569 - protein, 7 aa, synthetic construct
  REGION 1..7: note = source = /note="Description of Artificial Sequence: Synthetic peptide"
SQSISSY

SEQ ID NO: 1570 - protein, 12 aa, synthetic construct
  REGION 1..12: note = source = /note="Description of Artificial Sequence: Synthetic peptide"
SESLVHNSGKTY

SEQ ID NO: 1571 - protein, 7 aa, synthetic construct
  REGION 1..7: note = source = /note="Description of Artificial Sequence: Synthetic peptide"
SEDINKF

SEQ ID NO: 1572 - protein, 7 aa, synthetic construct
  REGION 1..7: note = source = /note="Description of Artificial Sequence: Synthetic peptide"
SQSVGSN

SEQ ID NO: 1573 - protein, 8 aa, synthetic construct
  REGION 1..8: note = source = /note="Description of Artificial Sequence: Synthetic peptide"
SQSIGSSS

SEQ ID NO: 1574 - protein, 7 aa, synthetic construct
  REGION 1..7: note = source = /note="Description of Artificial Sequence: Synthetic peptide"
SQDIDDA

SEQ ID NO: 1575 - protein, 7 aa, synthetic construct
  REGION 1..7: note = source = /note="Description of Artificial Sequence: Synthetic peptide"
SQDIYNN

SEQ ID NO: 1576 - protein, 12 aa, synthetic construct
  REGION 1..12: note = source = /note="Description of Artificial Sequence: Synthetic peptide"
SQSLLHSNGYNY

SEQ ID NO: 1577 - protein, 7 aa, synthetic construct
  REGION 1..7: note = source = /note="Description of Artificial Sequence: Synthetic peptide"
NNIGTKS

SEQ ID NO: 1578 - protein, 7 aa, synthetic construct
  REGION 1..7: note = source = /note="Description of Artificial Sequence: Synthetic peptide"
DGLSKKY

SEQ ID NO: 1579 - protein, 7 aa, synthetic construct
  REGION 1..7: note = source = /note="Description of Artificial Sequence: Synthetic peptide"
SQGIRNW

SEQ ID NO: 1580 - protein, 7 aa, synthetic construct
  REGION 1..7: note = source = /note="Description of Artificial Sequence: Synthetic peptide"
NNIGSKS

SEQ ID NO: 1581 - protein, 7 aa, synthetic construct
  REGION 1..7: note = source = /note="Description of Artificial Sequence: Synthetic peptide"
DSLGNYY

SEQ ID NO: 1582 - protein, 8 aa, synthetic construct
  REGION 1..8: note = source = /note="Description of Artificial Sequence: Synthetic peptide"
SQSVSSAY

SEQ ID NO: 1583 - protein, 7 aa, synthetic construct
  REGION 1..7: note = source = /note="Description of Artificial Sequence: Synthetic peptide"
SQSVSNS

SEQ ID NO: 1584 - protein, 8 aa, synthetic construct
  REGION 1..8: note = source = /note="Description of Artificial Sequence: Synthetic peptide"
SQSVSSSF

SEQ ID NO: 1585 - protein, 8 aa, synthetic construct
  REGION 1..8: note = source = /note="Description of Artificial Sequence: Synthetic peptide"
SQSVSTTF

SEQ ID NO: 1586 - protein, 7 aa, synthetic construct
  REGION 1..7: note = source = /note="Description of Artificial Sequence: Synthetic peptide"
SQSISSY

SEQ ID NO: 1587 - protein, 8 aa, synthetic construct
  REGION 1..8: note = source = /note="Description of Artificial Sequence: Synthetic peptide"
TQSIGSSF

SEQ ID NO: 1588 - protein, 8 aa, synthetic construct
  REGION 1..8: note = source = /note="Description of Artificial Sequence: Synthetic peptide"
SQSVSSSY

SEQ ID NO: 1589 - protein, 8 aa, synthetic construct
  REGION 1..8: note = source = /note="Description of Artificial Sequence: Synthetic peptide"
SQSVSSSY

SEQ ID NO: 1590 - protein, 8 aa, synthetic construct
  REGION 1..8: note = source = /note="Description of Artificial Sequence: Synthetic peptide"
SQRVASNY

SEQ ID NO: 1591 - protein, 8 aa, synthetic construct
  REGION 1..8: note = source = /note="Description of Artificial Sequence: Synthetic peptide"
SQSLSSNF

SEQ ID NO: 1592 - protein, 12 aa, synthetic construct
  REGION 1..12: note = source = /note="Description of Artificial Sequence: Synthetic peptide"
SQSLLHSNGYNY

SEQ ID NO: 1593 - protein, 8 aa, synthetic construct
  REGION 1..8: note = source = /note="Description of Artificial Sequence: Synthetic peptide"
SQSVSSSY

SEQ ID NO: 1594 - protein, 8 aa, synthetic construct
  REGION 1..8: note = source = /note="Description of Artificial Sequence: Synthetic peptide"
SQSVASSF

SEQ ID NO: 1595 - protein, 7 aa, synthetic construct
  REGION 1..7: note = source = /note="Description of Artificial Sequence: Synthetic peptide"
SQDVNTA

SEQ ID NO: 1596 - protein, 11 aa, synthetic construct
  REGION 1..11: note = source = /note="Description of Artificial Sequence: Synthetic peptide"
SESVSVIGAHL

SEQ ID NO: 1597 - protein, 11 aa, synthetic construct
  REGION 1..11: note = source = /note="Description of Artificial Sequence: Synthetic peptide"
SESVTILGSHL

SEQ ID NO: 1598 - protein, 11 aa, synthetic construct
  REGION 1..11: note = source = /note="Description of Artificial Sequence: Synthetic peptide"
SESVTILGSHL

SEQ ID NO: 1599-1638 - skipped (40 entries)

SEQ ID NO: 1639 - protein, 6 aa, synthetic construct
  REGION 1..6: note = source = /note="Description of Artificial Sequence: Synthetic peptide"
SYSTPY

SEQ ID NO: 1640 - protein, 7 aa, synthetic construct
  REGION 1..7: note = source = /note="Description of Artificial Sequence: Synthetic peptide"
YHSSPSW

SEQ ID NO: 1641 - protein, 6 aa, synthetic construct
  REGION 1..6: note = source = /note="Description of Artificial Sequence: Synthetic peptide"
ALQTPY

SEQ ID NO: 1642 - protein, 5 aa, synthetic construct
  REGION 1..5: note = source = /note="Description of Artificial Sequence: Synthetic peptide"
NIQFP

SEQ ID NO: 1643 - protein, 6 aa, synthetic construct
  REGION 1..6: note = source = /note="Description of Artificial Sequence: Synthetic peptide"
ALQTPY

SEQ ID NO: 1644 - protein, 5 aa, synthetic construct
  REGION 1..5: note = source = /note="Description of Artificial Sequence: Synthetic peptide"
SYKRA

SEQ ID NO: 1645 - protein, 6 aa, synthetic construct
  REGION 1..6: note = source = /note="Description of Artificial Sequence: Synthetic peptide"
GRQFPY

SEQ ID NO: 1646 - protein, 5 aa, synthetic construct
  REGION 1..5: note = source = /note="Description of Artificial Sequence: Synthetic peptide"
YGSSL

SEQ ID NO: 1647 - protein, 6 aa, synthetic construct
  REGION 1..6: note = source = /note="Description of Artificial Sequence: Synthetic peptide"
YGSSSW

SEQ ID NO: 1648 - protein, 7 aa, synthetic construct
  REGION 1..7: note = source = /note="Description of Artificial Sequence: Synthetic peptide"
YGSSPPW

SEQ ID NO: 1649 - protein, 4 aa, synthetic construct
  REGION 1..4: note = source = /note="Description of Artificial Sequence: Synthetic peptide"
SYTL

SEQ ID NO: 1650 - protein, 6 aa, synthetic construct
  REGION 1..6: note = source = /note="Description of Artificial Sequence: Synthetic peptide"
GTHWPG

SEQ ID NO: 1651 - protein, 6 aa, synthetic construct
  REGION 1..6: note = source = /note="Description of Artificial Sequence: Synthetic peptide"
YESLPL

SEQ ID NO: 1652 - protein, 7 aa, synthetic construct
  REGION 1..7: note = source = /note="Description of Artificial Sequence: Synthetic peptide"
YNDWLPV

SEQ ID NO: 1653 - protein, 7 aa, synthetic construct
  REGION 1..7: note = source = /note="Description of Artificial Sequence: Synthetic peptide"
YAGSPPF

SEQ ID NO: 1654 - protein, 6 aa, synthetic construct
  REGION 1..6: note = source = /note="Description of Artificial Sequence: Synthetic peptide"
HDNFPL

SEQ ID NO: 1655 - protein, 6 aa, synthetic construct
  REGION 1..6: note = source = /note="Description of Artificial Sequence: Synthetic peptide"
YYRFPY

SEQ ID NO: 1656 - protein, 6 aa, synthetic construct
  REGION 1..6: note = source = /note="Description of Artificial Sequence: Synthetic peptide"
ALQTPY

SEQ ID NO: 1657 - protein, 8 aa, synthetic construct
  REGION 1..8: note = source = /note="Description of Artificial Sequence: Synthetic peptide"
WDSDSEHV

SEQ ID NO: 1658 - protein, 6 aa, synthetic construct
  REGION 1..6: note = source = /note="Description of Artificial Sequence: Synthetic peptide"
WDDTTV

SEQ ID NO: 1659 - protein, 6 aa, synthetic construct
  REGION 1..6: note = source = /note="Description of Artificial Sequence: Synthetic peptide"
YNSAPF

SEQ ID NO: 1660 - protein, 9 aa, synthetic construct
  REGION 1..9: note = source = /note="Description of Artificial Sequence: Synthetic peptide"
RDSSGDHLR

SEQ ID NO: 1661 - protein, 8 aa, synthetic construct
  REGION 1..8: note = source = /note="Description of Artificial Sequence: Synthetic peptide"
RDSSGHHL

SEQ ID NO: 1662 - protein, 11 aa, synthetic construct
  REGION 1..11: note = source = /note="Description of Artificial Sequence: Synthetic peptide"
YGSSFNGSSLF

SEQ ID NO: 1663 - protein, 7 aa, synthetic construct
  REGION 1..7: note = source = /note="Description of Artificial Sequence: Synthetic peptide"
FGTSSGL

SEQ ID NO: 1664 - protein, 7 aa, synthetic construct
  REGION 1..7: note = source = /note="Description of Artificial Sequence: Synthetic peptide"
YHSSPSW

SEQ ID NO: 1665 - protein, 7 aa, synthetic construct
  REGION 1..7: note = source = /note="Description of Artificial Sequence: Synthetic peptide"
YHSSPSW

SEQ ID NO: 1666 - protein, 6 aa, synthetic construct
  REGION 1..6: note = source = /note="Description of Artificial Sequence: Synthetic peptide"
SYSTPY

SEQ ID NO: 1667 - protein, 7 aa, synthetic construct
  REGION 1..7: note = source = /note="Description of Artificial Sequence: Synthetic peptide"
YESSPSW

SEQ ID NO: 1668 - protein, 7 aa, synthetic construct
  REGION 1..7: note = source = /note="Description of Artificial Sequence: Synthetic peptide"
YGSPPRF

SEQ ID NO: 1669 - protein, 7 aa, synthetic construct
  REGION 1..7: note = source = /note="Description of Artificial Sequence: Synthetic peptide"
YGSSPSW

SEQ ID NO: 1670 - protein, 7 aa, synthetic construct
  REGION 1..7: note = source = /note="Description of Artificial Sequence: Synthetic peptide"
YDSSPSW

SEQ ID NO: 1671 - protein, 7 aa, synthetic construct
  REGION 1..7: note = source = /note="Description of Artificial Sequence: Synthetic peptide"
YGTSPMY

SEQ ID NO: 1672 - protein, 6 aa, synthetic construct
  REGION 1..6: note = source = /note="Description of Artificial Sequence: Synthetic peptide"
ALQTPL

SEQ ID NO: 1673 - protein, 8 aa, synthetic construct
  REGION 1..8: note = source = /note="Description of Artificial Sequence: Synthetic peptide"
YGNSPPKF

SEQ ID NO: 1674 - protein, 7 aa, synthetic construct
  REGION 1..7: note = source = /note="Description of Artificial Sequence: Synthetic peptide"
YGGSPRL

SEQ ID NO: 1675 - protein, 6 aa, synthetic construct
  REGION 1..6: note = source = /note="Description of Artificial Sequence: Synthetic peptide"
HYSTPW

SEQ ID NO: 1676 - protein, 6 aa, synthetic construct
  REGION 1..6: note = source = /note="Description of Artificial Sequence: Synthetic peptide"
SRIFPR

SEQ ID NO: 1677 - protein, 6 aa, synthetic construct
  REGION 1..6: note = source = /note="Description of Artificial Sequence: Synthetic peptide"
SRTIPR

SEQ ID NO: 1678 - protein, 6 aa, synthetic construct
  REGION 1..6: note = source = /note="Description of Artificial Sequence: Synthetic peptide"
SRTIPR

SEQ ID NO: 1679 - protein, 10 aa, synthetic construct
  REGION 1..10: note = source = /note="Description of Artificial Sequence: Synthetic peptide"
GFALSNHGMS

SEQ ID NO: 1680 - protein, 10 aa, synthetic construct
  REGION 1..10: note = source = /note="Description of Artificial Sequence: Synthetic peptide"
GFTFSNYAMS

SEQ ID NO: 1681 - protein, 10 aa, synthetic construct
  REGION 1..10: note = source = /note="Description of Artificial Sequence: Synthetic peptide"
GFTFDDYAMH

SEQ ID NO: 1682 - protein, 10 aa, synthetic construct
  REGION 1..10: note = source = /note="Description of Artificial Sequence: Synthetic peptide"
GFALSNHGMS

SEQ ID NO: 1683 - protein, 10 aa, synthetic construct
  REGION 1..10: note = source = /note="Description of Artificial Sequence: Synthetic peptide"
GYIFDNFGIN

SEQ ID NO: 1684 - protein, 10 aa, synthetic construct
  REGION 1..10: note = source = /note="Description of Artificial Sequence: Synthetic peptide"
GFTFSSDAMT

SEQ ID NO: 1685 - protein, 10 aa, synthetic construct
  REGION 1..10: note = source = /note="Description of Artificial Sequence: Synthetic peptide"
GYTFSNYGIT

SEQ ID NO: 1686 - protein, 10 aa, synthetic construct
  REGION 1..10: note = source = /note="Description of Artificial Sequence: Synthetic peptide"
GFALSNHGMS

SEQ ID NO: 1687 - protein, 10 aa, synthetic construct
  REGION 1..10: note = source = /note="Description of Artificial Sequence: Synthetic peptide"
GFALSNHGMS

SEQ ID NO: 1688 - protein, 10 aa, synthetic construct
  REGION 1..10: note = source = /note="Description of Artificial Sequence: Synthetic peptide"
GFALSNHGMS

SEQ ID NO: 1689 - protein, 10 aa, synthetic construct
  REGION 1..10: note = source = /note="Description of Artificial Sequence: Synthetic peptide"
GFTFSDYYMS

SEQ ID NO: 1690 - protein, 10 aa, synthetic construct
  REGION 1..10: note = source = /note="Description of Artificial Sequence: Synthetic peptide"
GFTFSDYYMS

SEQ ID NO: 1691 - protein, 10 aa, synthetic construct
  REGION 1..10: note = source = /note="Description of Artificial Sequence: Synthetic peptide"
GFALSNHGMS

SEQ ID NO: 1692 - protein, 10 aa, synthetic construct
  REGION 1..10: note = source = /note="Description of Artificial Sequence: Synthetic peptide"
GFALSNHGMS

SEQ ID NO: 1693 - protein, 10 aa, synthetic construct
  REGION 1..10: note = source = /note="Description of Artificial Sequence: Synthetic peptide"
GFALSNHGMS

SEQ ID NO: 1694 - protein, 12 aa, synthetic construct
  REGION 1..12: note = source = /note="Description of Artificial Sequence: Synthetic peptide"
GGSISSSYYYWG

SEQ ID NO: 1695 - protein, 12 aa, synthetic construct
  REGION 1..12: note = source = /note="Description of Artificial Sequence: Synthetic peptide"
GFSLRTSGMCVS

SEQ ID NO: 1696 - protein, 10 aa, synthetic construct
  REGION 1..10: note = source = /note="Description of Artificial Sequence: Synthetic peptide"
GFTFSSYSMN

SEQ ID NO: 1697 - protein, 10 aa, synthetic construct
  REGION 1..10: note = source = /note="Description of Artificial Sequence: Synthetic peptide"
GFTFSDYYMS

SEQ ID NO: 1698 - protein, 10 aa, synthetic construct
  REGION 1..10: note = source = /note="Description of Artificial Sequence: Synthetic peptide"
GYTVTSHYIH

SEQ ID NO: 1699 - protein, 12 aa, synthetic construct
  REGION 1..12: note = source = /note="Description of Artificial Sequence: Synthetic peptide"
GGSISSGGYYWS

SEQ ID NO: 1700 - protein, 10 aa, synthetic construct
  REGION 1..10: note = source = /note="Description of Artificial Sequence: Synthetic peptide"
GGTFSSYAIS

SEQ ID NO: 1701 - protein, 12 aa, synthetic construct
  REGION 1..12: note = source = /note="Description of Artificial Sequence: Synthetic peptide"
GDSVSSNSAAWN

SEQ ID NO: 1702 - protein, 10 aa, synthetic construct
  REGION 1..10: note = source = /note="Description of Artificial Sequence: Synthetic peptide"
GFTFSSYAMS

SEQ ID NO: 1703 - protein, 10 aa, synthetic construct
  REGION 1..10: note = source = /note="Description of Artificial Sequence: Synthetic peptide"
GITFSRYPMS

SEQ ID NO: 1704 - protein, 10 aa, synthetic construct
  REGION 1..10: note = source = /note="Description of Artificial Sequence: Synthetic peptide"
GFTFSSYAMS

SEQ ID NO: 1705 - protein, 10 aa, synthetic construct
  REGION 1..10: note = source = /note="Description of Artificial Sequence: Synthetic peptide"
GFTFSSYAMS

SEQ ID NO: 1706 - protein, 10 aa, synthetic construct
  REGION 1..10: note = source = /note="Description of Artificial Sequence: Synthetic peptide"
GFTFDDYAMH

SEQ ID NO: 1707 - protein, 10 aa, synthetic construct
  REGION 1..10: note = source = /note="Description of Artificial Sequence: Synthetic peptide"
GFTFDDYAMH

SEQ ID NO: 1708 - protein, 10 aa, synthetic construct
  REGION 1..10: note = source = /note="Description of Artificial Sequence: Synthetic peptide"
GFTFSSYAMS

SEQ ID NO: 1709 - protein, 10 aa, synthetic construct
  REGION 1..10: note = source = /note="Description of Artificial Sequence: Synthetic peptide"
GFTFSSYAMS

SEQ ID NO: 1710 - protein, 10 aa, synthetic construct
  REGION 1..10: note = source = /note="Description of Artificial Sequence: Synthetic peptide"
GFTFSSYAMS

SEQ ID NO: 1711 - protein, 10 aa, synthetic construct
  REGION 1..10: note = source = /note="Description of Artificial Sequence: Synthetic peptide"
GFSFSSYAMS

SEQ ID NO: 1712 - protein, 10 aa, synthetic construct
  REGION 1..10: note = source = /note="Description of Artificial Sequence: Synthetic peptide"
GFTFSSYAMS

SEQ ID NO: 1713 - protein, 10 aa, synthetic construct
  REGION 1..10: note = source = /note="Description of Artificial Sequence: Synthetic peptide"
GFTFSSYAMS

SEQ ID NO: 1714 - protein, 10 aa, synthetic construct
  REGION 1..10: note = source = /note="Description of Artificial Sequence: Synthetic peptide"
GFTFSSYAMS

SEQ ID NO: 1715 - protein, 10 aa, synthetic construct
  REGION 1..10: note = source = /note="Description of Artificial Sequence: Synthetic peptide"
GYTFTNFGMN

SEQ ID NO: 1716 - protein, 10 aa, synthetic construct
  REGION 1..10: note = source = /note="Description of Artificial Sequence: Synthetic peptide"
GYTFTDYSIN

SEQ ID NO: 1717 - protein, 10 aa, synthetic construct
  REGION 1..10: note = source = /note="Description of Artificial Sequence: Synthetic peptide"
GYTFRHYSMN

SEQ ID NO: 1718 - protein, 10 aa, synthetic construct
  REGION 1..10: note = source = /note="Description of Artificial Sequence: Synthetic peptide"
GYTFTHYSMN

SEQ ID NO: 1719 - protein, 16 aa, synthetic construct
  REGION 1..16: note = source = /note="Description of Artificial Sequence: Synthetic peptide"
GIVYSGSTYYAASVKG

SEQ ID NO: 1720 - protein, 17 aa, synthetic construct
  REGION 1..17: note = source = /note="Description of Artificial Sequence: Synthetic peptide"
GISRSGENTYYADSVKG

SEQ ID NO: 1721 - protein, 17 aa, synthetic construct
  REGION 1..17: note = source = /note="Description of Artificial Sequence: Synthetic peptide"
GISWNSGSIGYADSVKG

SEQ ID NO: 1722 - protein, 16 aa, synthetic construct
  REGION 1..16: note = source = /note="Description of Artificial Sequence: Synthetic peptide"
GIVYSGSTYYAASVKG

SEQ ID NO: 1723 - protein, 17 aa, synthetic construct
  REGION 1..17: note = source = /note="Description of Artificial Sequence: Synthetic peptide"
WINPKNNNTNYAQKFQG

SEQ ID NO: 1724 - protein, 17 aa, synthetic construct
  REGION 1..17: note = source = /note="Description of Artificial Sequence: Synthetic peptide"
VISGSGGTTYYADSVKG

SEQ ID NO: 1725 - protein, 17 aa, synthetic construct
  REGION 1..17: note = source = /note="Description of Artificial Sequence: Synthetic peptide"
WISAYNGNTNYAQKFQG

SEQ ID NO: 1726 - protein, 16 aa, synthetic construct
  REGION 1..16: note = source = /note="Description of Artificial Sequence: Synthetic peptide"
GIVYSGSTYYAASVKG

SEQ ID NO: 1727 - protein, 16 aa, synthetic construct
  REGION 1..16: note = source = /note="Description of Artificial Sequence: Synthetic peptide"
GIVYSGSTYYAASVKG

SEQ ID NO: 1728 - protein, 16 aa, synthetic construct
  REGION 1..16: note = source = /note="Description of Artificial Sequence: Synthetic peptide"
GIVYSGSTYYAASVKG

SEQ ID NO: 1729 - protein, 17 aa, synthetic construct
  REGION 1..17: note = source = /note="Description of Artificial Sequence: Synthetic peptide"
YISSSGSTIYYADSVKG

SEQ ID NO: 1730 - protein, 17 aa, synthetic construct
  REGION 1..17: note = source = /note="Description of Artificial Sequence: Synthetic peptide"
YISSSGNTIYYADSVKG

SEQ ID NO: 1731 - protein, 16 aa, synthetic construct
  REGION 1..16: note = source = /note="Description of Artificial Sequence: Synthetic peptide"
GIVYSGSTYYAASVKG

SEQ ID NO: 1732 - protein, 16 aa, synthetic construct
  REGION 1..16: note = source = /note="Description of Artificial Sequence: Synthetic peptide"
GIVYSGSTYYAASVKG

SEQ ID NO: 1733 - protein, 16 aa, synthetic construct
  REGION 1..16: note = source = /note="Description of Artificial Sequence: Synthetic peptide"
GIVYSGSTYYAASVKG

SEQ ID NO: 1734 - protein, 16 aa, synthetic construct
  REGION 1..16: note = source = /note="Description of Artificial Sequence: Synthetic peptide"
SIYYSGSAYYNPSLKS

SEQ ID NO: 1735 - protein, 16 aa, synthetic construct
  REGION 1..16: note = source = /note="Description of Artificial Sequence: Synthetic peptide"
RIDWDEDKFYSTSLKT

SEQ ID NO: 1736 - protein, 17 aa, synthetic construct
  REGION 1..17: note = source = /note="Description of Artificial Sequence: Synthetic peptide"
SISSSSSYIYYADSVKG

SEQ ID NO: 1737 - protein, 17 aa, synthetic construct
  REGION 1..17: note = source = /note="Description of Artificial Sequence: Synthetic peptide"
YISSSGSTIYYADSVKG

SEQ ID NO: 1738 - protein, 17 aa, synthetic construct
  REGION 1..17: note = source = /note="Description of Artificial Sequence: Synthetic peptide"
MINPSGGVTAYSQTLQG

SEQ ID NO: 1739 - protein, 16 aa, synthetic construct
  REGION 1..16: note = source = /note="Description of Artificial Sequence: Synthetic peptide"
YIYYSGSTYYNPSLKS

SEQ ID NO: 1740 - protein, 17 aa, synthetic construct
  REGION 1..17: note = source = /note="Description of Artificial Sequence: Synthetic peptide"
GIIPIFGTANYAQKFQG

SEQ ID NO: 1741 - protein, 18 aa, synthetic construct
  REGION 1..18: note = source = /note="Description of Artificial Sequence: Synthetic peptide"
RTYYRSKWYSFYAISLKS

SEQ ID NO: 1742 - protein, 17 aa, synthetic construct
  REGION 1..17: note = source = /note="Description of Artificial Sequence: Synthetic peptide"
AISGSGGSTYYADSVKG

SEQ ID NO: 1743 - protein, 17 aa, synthetic construct
  REGION 1..17: note = source = /note="Description of Artificial Sequence: Synthetic peptide"
GISDSGVSTYYADSAKG

SEQ ID NO: 1744 - protein, 17 aa, synthetic construct
  REGION 1..17: note = source = /note="Description of Artificial Sequence: Synthetic peptide"
AISGSGGSTYYADSVKG

SEQ ID NO: 1745 - protein, 17 aa, synthetic construct
  REGION 1..17: note = source = /note="Description of Artificial Sequence: Synthetic peptide"
AISGSGGSTYYADSVKG

SEQ ID NO: 1746 - protein, 17 aa, synthetic construct
  REGION 1..17: note = source = /note="Description of Artificial Sequence: Synthetic peptide"
GISWNSGSIGYADSVKG

SEQ ID NO: 1747 - protein, 17 aa, synthetic construct
  REGION 1..17: note = source = /note="Description of Artificial Sequence: Synthetic peptide"
SINWKGNSLAYGDSVKG

SEQ ID NO: 1748 - protein, 17 aa, synthetic construct
  REGION 1..17: note = source = /note="Description of Artificial Sequence: Synthetic peptide"
AISGSGGSTYYADSVKG

SEQ ID NO: 1749 - protein, 17 aa, synthetic construct
  REGION 1..17: note = source = /note="Description of Artificial Sequence: Synthetic peptide"
AISGSGGSTYYADSVKG

SEQ ID NO: 1750 - protein, 17 aa, synthetic construct
  REGION 1..17: note = source = /note="Description of Artificial Sequence: Synthetic peptide"
AISGSGGSTYYADSVKG

SEQ ID NO: 1751 - protein, 17 aa, synthetic construct
  REGION 1..17: note = source = /note="Description of Artificial Sequence: Synthetic peptide"
AISGSGGSTYYADSVKG

SEQ ID NO: 1752 - protein, 17 aa, synthetic construct
  REGION 1..17: note = source = /note="Description of Artificial Sequence: Synthetic peptide"
AISGSGGSTYYADSVKG

SEQ ID NO: 1753 - protein, 17 aa, synthetic construct
  REGION 1..17: note = source = /note="Description of Artificial Sequence: Synthetic peptide"
AISGSGGSTYYADSVKG

SEQ ID NO: 1754 - protein, 17 aa, synthetic construct
  REGION 1..17: note = source = /note="Description of Artificial Sequence: Synthetic peptide"
AISGSGGSTYYADSVKG

SEQ ID NO: 1755 - protein, 17 aa, synthetic construct
  REGION 1..17: note = source = /note="Description of Artificial Sequence: Synthetic peptide"
WINTYTGESYFADDFKG

SEQ ID NO: 1756 - protein, 17 aa, synthetic construct
  REGION 1..17: note = source = /note="Description of Artificial Sequence: Synthetic peptide"
WINTETREPAYAYDFRG

SEQ ID NO: 1757 - protein, 17 aa, synthetic construct
  REGION 1..17: note = source = /note="Description of Artificial Sequence: Synthetic peptide"
RINTESGVPIYADDFKG

SEQ ID NO: 1758 - protein, 17 aa, synthetic construct
  REGION 1..17: note = source = /note="Description of Artificial Sequence: Synthetic peptide"
RINTETGEPLYADDFKG

SEQ ID NO: 1759 - protein, 7 aa, synthetic construct
  REGION 1..7: note = source = /note="Description of Artificial Sequence: Synthetic peptide"
HGGESDV

SEQ ID NO: 1760 - protein, 11 aa, synthetic construct
  REGION 1..11: note = source = /note="Description of Artificial Sequence: Synthetic peptide"
SPAHYYGGMDV

SEQ ID NO: 1761 - protein, 6 aa, synthetic construct
  REGION 1..6: note = source = /note="Description of Artificial Sequence: Synthetic peptide"
HSFLAY

SEQ ID NO: 1762 - protein, 7 aa, synthetic construct
  REGION 1..7: note = source = /note="Description of Artificial Sequence: Synthetic peptide"
HGGESDV

SEQ ID NO: 1763 - protein, 11 aa, synthetic construct
  REGION 1..11: note = source = /note="Description of Artificial Sequence: Synthetic peptide"
GPYYYQSYMDV

SEQ ID NO: 1764 - protein, 14 aa, synthetic construct
  REGION 1..14: note = source = /note="Description of Artificial Sequence: Synthetic peptide"
LDSSGYYYARGPRY

SEQ ID NO: 1765 - protein, 9 aa, synthetic construct
  REGION 1..9: note = source = /note="Description of Artificial Sequence: Synthetic peptide"
GPYYYYMDV

SEQ ID NO: 1766 - protein, 7 aa, synthetic construct
  REGION 1..7: note = source = /note="Description of Artificial Sequence: Synthetic peptide"
HGGESDV

SEQ ID NO: 1767 - protein, 7 aa, synthetic construct
  REGION 1..7: note = source = /note="Description of Artificial Sequence: Synthetic peptide"
HGGESDV

SEQ ID NO: 1768 - protein, 7 aa, synthetic construct
  REGION 1..7: note = source = /note="Description of Artificial Sequence: Synthetic peptide"
HGGESDV

SEQ ID NO: 1769 - protein, 8 aa, synthetic construct
  REGION 1..8: note = source = /note="Description of Artificial Sequence: Synthetic peptide"
ESGDGMDV

SEQ ID NO: 1770 - protein, 8 aa, synthetic construct
  REGION 1..8: note = source = /note="Description of Artificial Sequence: Synthetic peptide"
STMVREDY

SEQ ID NO: 1771 - protein, 7 aa, synthetic construct
  REGION 1..7: note = source = /note="Description of Artificial Sequence: Synthetic peptide"
HGGESDV

SEQ ID NO: 1772 - protein, 7 aa, synthetic construct
  REGION 1..7: note = source = /note="Description of Artificial Sequence: Synthetic peptide"
HGGESDV

SEQ ID NO: 1773 - protein, 7 aa, synthetic construct
  REGION 1..7: note = source = /note="Description of Artificial Sequence: Synthetic peptide"
HGGESDV

SEQ ID NO: 1774 - protein, 11 aa, synthetic construct
  REGION 1..11: note = source = /note="Description of Artificial Sequence: Synthetic peptide"
HWQEWPDAFDI

SEQ ID NO: 1775 - protein, 13 aa, synthetic construct
  REGION 1..13: note = source = /note="Description of Artificial Sequence: Synthetic peptide"
SGAGGTSATAFDI

SEQ ID NO: 1776 - protein, 10 aa, synthetic construct
  REGION 1..10: note = source = /note="Description of Artificial Sequence: Synthetic peptide"
TIAAVYAFDI

SEQ ID NO: 1777 - protein, 8 aa, synthetic construct
  REGION 1..8: note = source = /note="Description of Artificial Sequence: Synthetic peptide"
DLRGAFDI

SEQ ID NO: 1778 - protein, 11 aa, synthetic construct
  REGION 1..11: note = source = /note="Description of Artificial Sequence: Synthetic peptide"
EGSGSGWYFDF

SEQ ID NO: 1779 - protein, 13 aa, synthetic construct
  REGION 1..13: note = source = /note="Description of Artificial Sequence: Synthetic peptide"
AGIAARLRGAFDI

SEQ ID NO: 1780 - protein, 20 aa, synthetic construct
  REGION 1..20: note = source = /note="Description of Artificial Sequence: Synthetic peptide"
RGGYQLLRWDVGLLRSAFDI

SEQ ID NO: 1781 - protein, 13 aa, synthetic construct
  REGION 1..13: note = source = /note="Description of Artificial Sequence: Synthetic peptide"
SSPEGLFLYWFDP

SEQ ID NO: 1782 - protein, 9 aa, synthetic construct
  REGION 1..9: note = source = /note="Description of Artificial Sequence: Synthetic peptide"
VEGSGSLDY

SEQ ID NO: 1783 - protein, 9 aa, synthetic construct
  REGION 1..9: note = source = /note="Description of Artificial Sequence: Synthetic peptide"
RAGSEASDI

SEQ ID NO: 1784 - protein, 15 aa, synthetic construct
  REGION 1..15: note = source = /note="Description of Artificial Sequence: Synthetic peptide"
ATYKRELRYYYGMDV

SEQ ID NO: 1785 - protein, 15 aa, synthetic construct
  REGION 1..15: note = source = /note="Description of Artificial Sequence: Synthetic peptide"
ATYKRELRYYYGMDV

SEQ ID NO: 1786 - protein, 8 aa, synthetic construct
  REGION 1..8: note = source = /note="Description of Artificial Sequence: Synthetic peptide"
VGKAVPDV

SEQ ID NO: 1787 - protein, 13 aa, synthetic construct
  REGION 1..13: note = source = /note="Description of Artificial Sequence: Synthetic peptide"
HQGVAYYNYAMDV

SEQ ID NO: 1788 - protein, 8 aa, synthetic construct
  REGION 1..8: note = source = /note="Description of Artificial Sequence: Synthetic peptide"
VVRDGMDV

SEQ ID NO: 1789 - protein, 9 aa, synthetic construct
  REGION 1..9: note = source = /note="Description of Artificial Sequence: Synthetic peptide"
IPQTGTFDY

SEQ ID NO: 1790 - protein, 15 aa, synthetic construct
  REGION 1..15: note = source = /note="Description of Artificial Sequence: Synthetic peptide"
ANYKRELRYYYGMDV

SEQ ID NO: 1791 - protein, 11 aa, synthetic construct
  REGION 1..11: note = source = /note="Description of Artificial Sequence: Synthetic peptide"
ALVGATGAFDI

SEQ ID NO: 1792 - protein, 8 aa, synthetic construct
  REGION 1..8: note = source = /note="Description of Artificial Sequence: Synthetic peptide"
WFGEGFDP

SEQ ID NO: 1793 - protein, 17 aa, synthetic construct
  REGION 1..17: note = source = /note="Description of Artificial Sequence: Synthetic peptide"
VGYDSSGYYRDYYGMDV

SEQ ID NO: 1794 - protein, 13 aa, synthetic construct
  REGION 1..13: note = source = /note="Description of Artificial Sequence: Synthetic peptide"
MGWSSGYLGAFDI

SEQ ID NO: 1795 - protein, 13 aa, synthetic construct
  REGION 1..13: note = source = /note="Description of Artificial Sequence: Synthetic peptide"
GEIYYGYDGGFAY

SEQ ID NO: 1796 - protein, 8 aa, synthetic construct
  REGION 1..8: note = source = /note="Description of Artificial Sequence: Synthetic peptide"
DYSYAMDY

SEQ ID NO: 1797 - protein, 8 aa, synthetic construct
  REGION 1..8: note = source = /note="Description of Artificial Sequence: Synthetic peptide"
DYLYSLDF

SEQ ID NO: 1798 - protein, 8 aa, synthetic construct
  REGION 1..8: note = source = /note="Description of Artificial Sequence: Synthetic peptide"
DYLYSCDY

SEQ ID NO: 1799 - protein, 11 aa, synthetic construct
  REGION 1..11: note = source = /note="Description of Artificial Sequence: Synthetic peptide"
RASQSISSYLN

SEQ ID NO: 1800 - protein, 12 aa, synthetic construct
  REGION 1..12: note = source = /note="Description of Artificial Sequence: Synthetic peptide"
RASQSISSSFLA

SEQ ID NO: 1801 - protein, 16 aa, synthetic construct
  REGION 1..16: note = source = /note="Description of Artificial Sequence: Synthetic peptide"
RSSQSLLHSNGYNYLD

SEQ ID NO: 1802 - protein, 16 aa, synthetic construct
  REGION 1..16: note = source = /note="Description of Artificial Sequence: Synthetic peptide"
KSSQSLLRNDGKTPLY

SEQ ID NO: 1803 - protein, 16 aa, synthetic construct
  REGION 1..16: note = source = /note="Description of Artificial Sequence: Synthetic peptide"
RSSQSLLHSNGYNYLN

SEQ ID NO: 1804 - protein, 11 aa, synthetic construct
  REGION 1..11: note = source = /note="Description of Artificial Sequence: Synthetic peptide"
RASQSISSYLN

SEQ ID NO: 1805 - protein, 16 aa, synthetic construct
  REGION 1..16: note = source = /note="Description of Artificial Sequence: Synthetic peptide"
RSSQSLLYSNGYNYVD

SEQ ID NO: 1806 - protein, 11 aa, synthetic construct
  REGION 1..11: note = source = /note="Description of Artificial Sequence: Synthetic peptide"
RASQSVSSNLA

SEQ ID NO: 1807 - protein, 11 aa, synthetic construct
  REGION 1..11: note = source = /note="Description of Artificial Sequence: Synthetic peptide"
RASQSVSSKLA

SEQ ID NO: 1808 - protein, 12 aa, synthetic construct
  REGION 1..12: note = source = /note="Description of Artificial Sequence: Synthetic peptide"
RASQSVGSTNLA

SEQ ID NO: 1809 - protein, 11 aa, synthetic construct
  REGION 1..11: note = source = /note="Description of Artificial Sequence: Synthetic peptide"
RASQSISSYLN

SEQ ID NO: 1810 - protein, 16 aa, synthetic construct
  REGION 1..16: note = source = /note="Description of Artificial Sequence: Synthetic peptide"
KSSESLVHNSGKTYLN

SEQ ID NO: 1811 - protein, 11 aa, synthetic construct
  REGION 1..11: note = source = /note="Description of Artificial Sequence: Synthetic peptide"
QASEDINKFLN

SEQ ID NO: 1812 - protein, 11 aa, synthetic construct
  REGION 1..11: note = source = /note="Description of Artificial Sequence: Synthetic peptide"
RASQSVGSNLA

SEQ ID NO: 1813 - protein, 12 aa, synthetic construct
  REGION 1..12: note = source = /note="Description of Artificial Sequence: Synthetic peptide"
RASQSIGSSSLA

SEQ ID NO: 1814 - protein, 11 aa, synthetic construct
  REGION 1..11: note = source = /note="Description of Artificial Sequence: Synthetic peptide"
KASQDIDDAMN

SEQ ID NO: 1815 - protein, 11 aa, synthetic construct
  REGION 1..11: note = source = /note="Description of Artificial Sequence: Synthetic peptide"
RASQDIYNNLA

SEQ ID NO: 1816 - protein, 16 aa, synthetic construct
  REGION 1..16: note = source = /note="Description of Artificial Sequence: Synthetic peptide"
RSSQSLLHSNGYNYLD

SEQ ID NO: 1817 - protein, 11 aa, synthetic construct
  REGION 1..11: note = source = /note="Description of Artificial Sequence: Synthetic peptide"
GGNNIGTKSVH

SEQ ID NO: 1818 - protein, 11 aa, synthetic construct
  REGION 1..11: note = source = /note="Description of Artificial Sequence: Synthetic peptide"
SGDGLSKKYVS

SEQ ID NO: 1819 - protein, 11 aa, synthetic construct
  REGION 1..11: note = source = /note="Description of Artificial Sequence: Synthetic peptide"
RASQGIRNWLA

SEQ ID NO: 1820 - protein, 11 aa, synthetic construct
  REGION 1..11: note = source = /note="Description of Artificial Sequence: Synthetic peptide"
GGNNIGSKSVH

SEQ ID NO: 1821 - protein, 11 aa, synthetic construct
  REGION 1..11: note = source = /note="Description of Artificial Sequence: Synthetic peptide"
QGDSLGNYYAT

SEQ ID NO: 1822 - protein, 12 aa, synthetic construct
  REGION 1..12: note = source = /note="Description of Artificial Sequence: Synthetic peptide"
RASQSVSSAYLA

SEQ ID NO: 1823 - protein, 11 aa, synthetic construct
  REGION 1..11: note = source = /note="Description of Artificial Sequence: Synthetic peptide"
RASQSVSNSLA

SEQ ID NO: 1824 - protein, 12 aa, synthetic construct
  REGION 1..12: note = source = /note="Description of Artificial Sequence: Synthetic peptide"
RASQSVSSSFLA

SEQ ID NO: 1825 - protein, 12 aa, synthetic construct
  REGION 1..12: note = source = /note="Description of Artificial Sequence: Synthetic peptide"
RASQSVSTTFLA

SEQ ID NO: 1826 - protein, 11 aa, synthetic construct
  REGION 1..11: note = source = /note="Description of Artificial Sequence: Synthetic peptide"
RASQSISSYLN

SEQ ID NO: 1827 - protein, 12 aa, synthetic construct
  REGION 1..12: note = source = /note="Description of Artificial Sequence: Synthetic peptide"
RATQSIGSSFLA

SEQ ID NO: 1828 - protein, 12 aa, synthetic construct
  REGION 1..12: note = source = /note="Description of Artificial Sequence: Synthetic peptide"
RASQSVSSSYLA

SEQ ID NO: 1829 - protein, 12 aa, synthetic construct
  REGION 1..12: note = source = /note="Description of Artificial Sequence: Synthetic peptide"
RASQSVSSSYLA

SEQ ID NO: 1830 - protein, 12 aa, synthetic construct
  REGION 1..12: note = source = /note="Description of Artificial Sequence: Synthetic peptide"
RASQRVASNYLA

SEQ ID NO: 1831 - protein, 12 aa, synthetic construct
  REGION 1..12: note = source = /note="Description of Artificial Sequence: Synthetic peptide"
RASQSLSSNFLA

SEQ ID NO: 1832 - protein, 16 aa, synthetic construct
  REGION 1..16: note = source = /note="Description of Artificial Sequence: Synthetic peptide"
RSSQSLLHSNGYNYLD

SEQ ID NO: 1833 - protein, 12 aa, synthetic construct
  REGION 1..12: note = source = /note="Description of Artificial Sequence: Synthetic peptide"
RASQSVSSSYLA

SEQ ID NO: 1834 - protein, 12 aa, synthetic construct
  REGION 1..12: note = source = /note="Description of Artificial Sequence: Synthetic peptide"
RASQSVASSFLA

SEQ ID NO: 1835 - protein, 11 aa, synthetic construct
  REGION 1..11: note = source = /note="Description of Artificial Sequence: Synthetic peptide"
RASQDVNTAVS

SEQ ID NO: 1836 - protein, 15 aa, synthetic construct
  REGION 1..15: note = source = /note="Description of Artificial Sequence: Synthetic peptide"
RASESVSVIGAHLIH

SEQ ID NO: 1837 - protein, 15 aa, synthetic construct
  REGION 1..15: note = source = /note="Description of Artificial Sequence: Synthetic peptide"
RASESVTILGSHLIY

SEQ ID NO: 1838 - protein, 15 aa, synthetic construct
  REGION 1..15: note = source = /note="Description of Artificial Sequence: Synthetic peptide"
RASESVTILGSHLIY

SEQ ID NO: 1839 - protein, 7 aa, synthetic construct
  REGION 1..7: note = source = /note="Description of Artificial Sequence: Synthetic peptide"
AASSLQS

SEQ ID NO: 1840 - protein, 7 aa, synthetic construct
  REGION 1..7: note = source = /note="Description of Artificial Sequence: Synthetic peptide"
GASRRAT

SEQ ID NO: 1841 - protein, 7 aa, synthetic construct
  REGION 1..7: note = source = /note="Description of Artificial Sequence: Synthetic peptide"
LGSNRAS

SEQ ID NO: 1842 - protein, 7 aa, synthetic construct
  REGION 1..7: note = source = /note="Description of Artificial Sequence: Synthetic peptide"
EVSNRFS

SEQ ID NO: 1843 - protein, 7 aa, synthetic construct
  REGION 1..7: note = source = /note="Description of Artificial Sequence: Synthetic peptide"
LGSKRAS

SEQ ID NO: 1844 - protein, 7 aa, synthetic construct
  REGION 1..7: note = source = /note="Description of Artificial Sequence: Synthetic peptide"
GASTLAS

SEQ ID NO: 1845 - protein, 7 aa, synthetic construct
  REGION 1..7: note = source = /note="Description of Artificial Sequence: Synthetic peptide"
LGSNRAS

SEQ ID NO: 1846 - protein, 7 aa, synthetic construct
  REGION 1..7: note = source = /note="Description of Artificial Sequence: Synthetic peptide"
GASTRAS

SEQ ID NO: 1847 - protein, 7 aa, synthetic construct
  REGION 1..7: note = source = /note="Description of Artificial Sequence: Synthetic peptide"
GASIRAT

SEQ ID NO: 1848 - protein, 7 aa, synthetic construct
  REGION 1..7: note = source = /note="Description of Artificial Sequence: Synthetic peptide"
DASNRAT

SEQ ID NO: 1849 - protein, 7 aa, synthetic construct
  REGION 1..7: note = source = /note="Description of Artificial Sequence: Synthetic peptide"
AASSLQS

SEQ ID NO: 1850 - protein, 7 aa, synthetic construct
  REGION 1..7: note = source = /note="Description of Artificial Sequence: Synthetic peptide"
EVSNRDS

SEQ ID NO: 1851 - protein, 7 aa, synthetic construct
  REGION 1..7: note = source = /note="Description of Artificial Sequence: Synthetic peptide"
DASTLQT

SEQ ID NO: 1852 - protein, 7 aa, synthetic construct
  REGION 1..7: note = source = /note="Description of Artificial Sequence: Synthetic peptide"
GASTRAT

SEQ ID NO: 1853 - protein, 7 aa, synthetic construct
  REGION 1..7: note = source = /note="Description of Artificial Sequence: Synthetic peptide"
GASSRAS

SEQ ID NO: 1854 - protein, 7 aa, synthetic construct
  REGION 1..7: note = source = /note="Description of Artificial Sequence: Synthetic peptide"
SATSPVP

SEQ ID NO: 1855 - protein, 7 aa, synthetic construct
  REGION 1..7: note = source = /note="Description of Artificial Sequence: Synthetic peptide"
AANKSQS

SEQ ID NO: 1856 - protein, 7 aa, synthetic construct
  REGION 1..7: note = source = /note="Description of Artificial Sequence: Synthetic peptide"
LGSNRAS

SEQ ID NO: 1857 - protein, 7 aa, synthetic construct
  REGION 1..7: note = source = /note="Description of Artificial Sequence: Synthetic peptide"
DDSVRPS

SEQ ID NO: 1858 - protein, 7 aa, synthetic construct
  REGION 1..7: note = source = /note="Description of Artificial Sequence: Synthetic peptide"
RDKERPS

SEQ ID NO: 1859 - protein, 7 aa, synthetic construct
  REGION 1..7: note = source = /note="Description of Artificial Sequence: Synthetic peptide"
AASNLQS

SEQ ID NO: 1860 - protein, 7 aa, synthetic construct
  REGION 1..7: note = source = /note="Description of Artificial Sequence: Synthetic peptide"
GKNNRPS

SEQ ID NO: 1861 - protein, 7 aa, synthetic construct
  REGION 1..7: note = source = /note="Description of Artificial Sequence: Synthetic peptide"
GTNNRPS

SEQ ID NO: 1862 - protein, 7 aa, synthetic construct
  REGION 1..7: note = source = /note="Description of Artificial Sequence: Synthetic peptide"
GASTRAT

SEQ ID NO: 1863 - protein, 7 aa, synthetic construct
  REGION 1..7: note = source = /note="Description of Artificial Sequence: Synthetic peptide"
DASSRAT

SEQ ID NO: 1864 - protein, 7 aa, synthetic construct
  REGION 1..7: note = source = /note="Description of Artificial Sequence: Synthetic peptide"
GASSRAT

SEQ ID NO: 1865 - protein, 7 aa, synthetic construct
  REGION 1..7: note = source = /note="Description of Artificial Sequence: Synthetic peptide"
GSSNRAT

SEQ ID NO: 1866 - protein, 7 aa, synthetic construct
  REGION 1..7: note = source = /note="Description of Artificial Sequence: Synthetic peptide"
AASSLQS

SEQ ID NO: 1867 - protein, 7 aa, synthetic construct
  REGION 1..7: note = source = /note="Description of Artificial Sequence: Synthetic peptide"
GASQRAT

SEQ ID NO: 1868 - protein, 7 aa, synthetic construct
  REGION 1..7: note = source = /note="Description of Artificial Sequence: Synthetic peptide"
GASSRAT

SEQ ID NO: 1869 - protein, 7 aa, synthetic construct
  REGION 1..7: note = source = /note="Description of Artificial Sequence: Synthetic peptide"
GASSRAT

SEQ ID NO: 1870 - protein, 7 aa, synthetic construct
  REGION 1..7: note = source = /note="Description of Artificial Sequence: Synthetic peptide"
GASSRAT

SEQ ID NO: 1871 - protein, 7 aa, synthetic construct
  REGION 1..7: note = source = /note="Description of Artificial Sequence: Synthetic peptide"
GASNWAT

SEQ ID NO: 1872 - protein, 7 aa, synthetic construct
  REGION 1..7: note = source = /note="Description of Artificial Sequence: Synthetic peptide"
LGSNRAS

SEQ ID NO: 1873 - protein, 7 aa, synthetic construct
  REGION 1..7: note = source = /note="Description of Artificial Sequence: Synthetic peptide"
GTSSRAT

SEQ ID NO: 1874 - protein, 7 aa, synthetic construct
  REGION 1..7: note = source = /note="Description of Artificial Sequence: Synthetic peptide"
GASGRAT

SEQ ID NO: 1875 - protein, 7 aa, synthetic construct
  REGION 1..7: note = source = /note="Description of Artificial Sequence: Synthetic peptide"
SASYRYT

SEQ ID NO: 1876 - protein, 7 aa, synthetic construct
  REGION 1..7: note = source = /note="Description of Artificial Sequence: Synthetic peptide"
LASNLET

SEQ ID NO: 1877 - protein, 7 aa, synthetic construct
  REGION 1..7: note = source = /note="Description of Artificial Sequence: Synthetic peptide"
LASNVQT

SEQ ID NO: 1878 - protein, 7 aa, synthetic construct
  REGION 1..7: note = source = /note="Description of Artificial Sequence: Synthetic peptide"
LASNVQT

SEQ ID NO: 1879 - protein, 9 aa, synthetic construct
  REGION 1..9: note = source = /note="Description of Artificial Sequence: Synthetic peptide"
QQSYSTPYT

SEQ ID NO: 1880 - protein, 10 aa, synthetic construct
  REGION 1..10: note = source = /note="Description of Artificial Sequence: Synthetic peptide"
QQYHSSPSWT

SEQ ID NO: 1881 - protein, 9 aa, synthetic construct
  REGION 1..9: note = source = /note="Description of Artificial Sequence: Synthetic peptide"
MQALQTPYT

SEQ ID NO: 1882 - protein, 8 aa, synthetic construct
  REGION 1..8: note = source = /note="Description of Artificial Sequence: Synthetic peptide"
MQNIQFPS

SEQ ID NO: 1883 - protein, 9 aa, synthetic construct
  REGION 1..9: note = source = /note="Description of Artificial Sequence: Synthetic peptide"
MQALQTPYT

SEQ ID NO: 1884 - protein, 8 aa, synthetic construct
  REGION 1..8: note = source = /note="Description of Artificial Sequence: Synthetic peptide"
QQSYKRAS

SEQ ID NO: 1885 - protein, 9 aa, synthetic construct
  REGION 1..9: note = source = /note="Description of Artificial Sequence: Synthetic peptide"
MQGRQFPYS

SEQ ID NO: 1886 - protein, 8 aa, synthetic construct
  REGION 1..8: note = source = /note="Description of Artificial Sequence: Synthetic peptide"
QQYGSSLT

SEQ ID NO: 1887 - protein, 9 aa, synthetic construct
  REGION 1..9: note = source = /note="Description of Artificial Sequence: Synthetic peptide"
QQYGSSSWT

SEQ ID NO: 1888 - protein, 10 aa, synthetic construct
  REGION 1..10: note = source = /note="Description of Artificial Sequence: Synthetic peptide"
QQYGSSPPWT

SEQ ID NO: 1889 - protein, 7 aa, synthetic construct
  REGION 1..7: note = source = /note="Description of Artificial Sequence: Synthetic peptide"
QQSYTLA

SEQ ID NO: 1890 - protein, 9 aa, synthetic construct
  REGION 1..9: note = source = /note="Description of Artificial Sequence: Synthetic peptide"
MQGTHWPGT

SEQ ID NO: 1891 - protein, 9 aa, synthetic construct
  REGION 1..9: note = source = /note="Description of Artificial Sequence: Synthetic peptide"
QQYESLPLT

SEQ ID NO: 1892 - protein, 10 aa, synthetic construct
  REGION 1..10: note = source = /note="Description of Artificial Sequence: Synthetic peptide"
QQYNDWLPVT

SEQ ID NO: 1893 - protein, 10 aa, synthetic construct
  REGION 1..10: note = source = /note="Description of Artificial Sequence: Synthetic peptide"
QQYAGSPPFT

SEQ ID NO: 1894 - protein, 9 aa, synthetic construct
  REGION 1..9: note = source = /note="Description of Artificial Sequence: Synthetic peptide"
LQHDNFPLT

SEQ ID NO: 1895 - protein, 9 aa, synthetic construct
  REGION 1..9: note = source = /note="Description of Artificial Sequence: Synthetic peptide"
QHYYRFPYS

SEQ ID NO: 1896 - protein, 9 aa, synthetic construct
  REGION 1..9: note = source = /note="Description of Artificial Sequence: Synthetic peptide"
MQALQTPYT

SEQ ID NO: 1897 - protein, 11 aa, synthetic construct
  REGION 1..11: note = source = /note="Description of Artificial Sequence: Synthetic peptide"
QVWDSDSEHVV

SEQ ID NO: 1898 - protein, 9 aa, synthetic construct
  REGION 1..9: note = source = /note="Description of Artificial Sequence: Synthetic peptide"
QAWDDTTVV

SEQ ID NO: 1899 - protein, 9 aa, synthetic construct
  REGION 1..9: note = source = /note="Description of Artificial Sequence: Synthetic peptide"
QKYNSAPFT

SEQ ID NO: 1900 - protein, 12 aa, synthetic construct
  REGION 1..12: note = source = /note="Description of Artificial Sequence: Synthetic peptide"
SSRDSSGDHLRV

SEQ ID NO: 1901 - protein, 11 aa, synthetic construct
  REGION 1..11: note = source = /note="Description of Artificial Sequence: Synthetic peptide"
NSRDSSGHHLL

SEQ ID NO: 1902 - protein, 14 aa, synthetic construct
  REGION 1..14: note = source = /note="Description of Artificial Sequence: Synthetic peptide"
QHYGSSFNGSSLFT

SEQ ID NO: 1903 - protein, 10 aa, synthetic construct
  REGION 1..10: note = source = /note="Description of Artificial Sequence: Synthetic peptide"
QQFGTSSGLT

SEQ ID NO: 1904 - protein, 10 aa, synthetic construct
  REGION 1..10: note = source = /note="Description of Artificial Sequence: Synthetic peptide"
QQYHSSPSWT

SEQ ID NO: 1905 - protein, 10 aa, synthetic construct
  REGION 1..10: note = source = /note="Description of Artificial Sequence: Synthetic peptide"
QQYHSSPSWT

SEQ ID NO: 1906 - protein, 9 aa, synthetic construct
  REGION 1..9: note = source = /note="Description of Artificial Sequence: Synthetic peptide"
QQSYSTPYS

SEQ ID NO: 1907 - protein, 10 aa, synthetic construct
  REGION 1..10: note = source = /note="Description of Artificial Sequence: Synthetic peptide"
QHYESSPSWT

SEQ ID NO: 1908 - protein, 10 aa, synthetic construct
  REGION 1..10: note = source = /note="Description of Artificial Sequence: Synthetic peptide"
QQYGSPPRFT

SEQ ID NO: 1909 - protein, 10 aa, synthetic construct
  REGION 1..10: note = source = /note="Description of Artificial Sequence: Synthetic peptide"
QHYGSSPSWT

SEQ ID NO: 1910 - protein, 10 aa, synthetic construct
  REGION 1..10: note = source = /note="Description of Artificial Sequence: Synthetic peptide"
QHYDSSPSWT

SEQ ID NO: 1911 - protein, 10 aa, synthetic construct
  REGION 1..10: note = source = /note="Description of Artificial Sequence: Synthetic peptide"
QYYGTSPMYT

SEQ ID NO: 1912 - protein, 9 aa, synthetic construct
  REGION 1..9: note = source = /note="Description of Artificial Sequence: Synthetic peptide"
MQALQTPLT

SEQ ID NO: 1913 - protein, 11 aa, synthetic construct
  REGION 1..11: note = source = /note="Description of Artificial Sequence: Synthetic peptide"
QHYGNSPPKFT

SEQ ID NO: 1914 - protein, 10 aa, synthetic construct
  REGION 1..10: note = source = /note="Description of Artificial Sequence: Synthetic peptide"
QHYGGSPRLT

SEQ ID NO: 1915 - protein, 9 aa, synthetic construct
  REGION 1..9: note = source = /note="Description of Artificial Sequence: Synthetic peptide"
QQHYSTPWT

SEQ ID NO: 1916 - protein, 9 aa, synthetic construct
  REGION 1..9: note = source = /note="Description of Artificial Sequence: Synthetic peptide"
LQSRIFPRT

SEQ ID NO: 1917 - protein, 9 aa, synthetic construct
  REGION 1..9: note = source = /note="Description of Artificial Sequence: Synthetic peptide"
LQSRTIPRT

SEQ ID NO: 1918 - protein, 9 aa, synthetic construct
  REGION 1..9: note = source = /note="Description of Artificial Sequence: Synthetic peptide"
LQSRTIPRT

SEQ ID NO: 1919 - protein, 21 aa, synthetic construct
  REGION 1..21: note = source = /note="Description of Artificial Sequence: Synthetic peptide"
MALPVTALLLPLALLLHAARP

SEQ ID NO: 1920 - DNA, 63 bp, synthetic construct; identical to SEQ ID NO: 402
  misc_feature 1..63: note = source = /note="Description of Artificial Sequence: Synthetic oligonucleotide"
  source 1..63: mol_type = other DNA

SEQ ID NO: 1921 - protein, 45 aa, synthetic construct; identical to SEQ ID NO: 403
  REGION 1..45: note = source = /note="Description of Artificial Sequence: Synthetic polypeptide"

SEQ ID NO: 1922 - DNA, 135 bp, synthetic construct; identical to SEQ ID NO: 404
  misc_feature 1..135: note = source = /note="Description of Artificial Sequence: Synthetic polynucleotide"
  source 1..135: mol_type = other DNA

SEQ ID NO: 1923 - protein, 24 aa, synthetic construct
  REGION 1..24: note = source = /note="Description of Artificial Sequence: Synthetic peptide"
IYIWAPLAGTCGVLLLSLVITLYC

SEQ ID NO: 1924 - DNA, 72 bp, synthetic construct; identical to SEQ ID NO: 13
  misc_feature 1..72: note = source = /note="Description of Artificial Sequence: Synthetic oligonucleotide"
  source 1..72: mol_type = other DNA

SEQ ID NO: 1925 - protein, 42 aa, synthetic construct; identical to SEQ ID NO: 14
  REGION 1..42: note = source = /note="Description of Artificial Sequence: Synthetic polypeptide"

SEQ ID NO: 1926 - DNA, 126 bp, synthetic construct; identical to SEQ ID NO: 15
  misc_feature 1..126: note = source = /note="Description of Artificial Sequence: Synthetic polynucleotide"
  source 1..126: mol_type = other DNA

SEQ ID NO: 1927 - protein, 41 aa, synthetic construct; identical to SEQ ID NO: 5
  REGION 1..41: note = source = /note="Description of Artificial Sequence: Synthetic polypeptide"

SEQ ID NO: 1928 - DNA, 123 bp, synthetic construct; identical to SEQ ID NO: 6
  misc_feature 1..123: note = source = /note="Description of Artificial Sequence: Synthetic polynucleotide"
  source 1..123: mol_type = other DNA

SEQ ID NO: 1929 - protein, 35 aa, synthetic construct
  REGION 1..35: note = source = /note="Description of Artificial Sequence: Synthetic polypeptide"
TKKKYSSSVHDPNGEYMFMRAVNTAKKSRLTDVTL

SEQ ID NO: 1930 - DNA, 105 bp, synthetic construct
  misc_feature 1..105: note = source = /note="Description of Artificial Sequence: Synthetic polynucleotide"
  source 1..105: mol_type = other DNA
acaaaaaagaagtattcatccagtgtgcacgaccctaacggtgaatacatgttcatgagagcagtgaacacagccaaaaaatccagactcacagatgtgacccta

SEQ ID NO: 1931 - protein, 112 aa, synthetic construct; identical to SEQ ID NO: 18
  REGION 1..112: note = source = /note="Description of Artificial Sequence: Synthetic polypeptide"

SEQ ID NO: 1932 - DNA, 336 bp, synthetic construct; identical to SEQ ID NO: 19
  misc_feature 1..336: note = source = /note="Description of Artificial Sequence: Synthetic polynucleotide"
  source 1..336: mol_type = other DNA

SEQ ID NO: 1933 - protein, 112 aa, synthetic construct; identical to SEQ ID NO: 20
  REGION 1..112: note = source = /note="Description of Artificial Sequence: Synthetic polypeptide"

SEQ ID NO: 1934 - DNA, 336 bp, synthetic construct; identical to SEQ ID NO: 21
  misc_feature 1..336: note = source = /note="Description of Artificial Sequence: Synthetic polynucleotide"
  source 1..336: mol_type = other DNA

SEQ ID NO: 1935 - protein, 230 aa, synthetic construct; identical to SEQ ID NO: 405
  REGION 1..230: note = source = /note="Description of Artificial Sequence: Synthetic polypeptide"

SEQ ID NO: 1936 - DNA, 690 bp, synthetic construct; identical to SEQ ID NO: 406
  misc_feature 1..690: note = source = /note="Description of Artificial Sequence: Synthetic polynucleotide"
  source 1..690: mol_type = other DNA

SEQ ID NO: 1937 - protein, 464 aa, synthetic construct
  REGION 1..464: note = source = /note="Description of Artificial Sequence: Synthetic polypeptide"
QVQLLESGAELVRPGSSVKISCKASGYAFSSYWMNWVKQRPGQGLEWIGQIYPGDGDTNYNGKFKGQATLTADKSSSTAYMQLSGLTSEDSAVYSCARKTISSVVDFYFDYWGQGTTVTGGGSGGGSGGGSGGGSELVLTQSPKFMSTSVGDRVSVTCKASQNVGTNVAWYQQKPGQSPKPLIYSATYRNSGVPDRFTGSGSGTDFTLTITNVQSKDLADYFCQYNRYPYTSFFFTKLEIKRRSKIEVMYPPPYLDNEKSNGTIIHVKGKHLCPSPLFPGPSKPFWVLVVVGGVLACYSLLVTVAFIIFWVRSKRSRLLHSDYMNMTPRRPGPTRKHYQPYAPPRDFAAYRSRVKFSRSADAPAYQQGQNQLYNELNLGRREEYDVLDKRRGRDPEMGGKPRRKNPQEGLYNELQKDKMAEAYSEIGMKGERRRGKGHDGLYQGLSTATKDTYDALHMQALPPR

SEQ ID NO: 1938 - protein, 439 aa, synthetic construct
  REGION 1..439: note = source = /note="Description of Artificial Sequence: Synthetic polypeptide"
DIQMTQTTSSLSASLGDRVTISCRASQDISKYLNWYQQKPDGTVKLLIYHTSRLHSGVPSRFSGSGSGTDYSLTISNLEQEDIATYFCQQGNTLPYTFGGGTKLEITGSTSGSGKPGSGEGSTKGEVKLQESGPGLVAPSQSLSVTCTVSGVSLPDYGVSWIRQPPRKGLEWLGVIWGSETTYYNSALKSRLTIIKDNSKSQVFLKMNSLQTDDTAIYYCAKHYYYGGSYAMDYWGQGTSVTVSSESKYGPPCPPCPMFWVLVVVGGVLACYSLLVTVAFIIFWVKRGRKKLLYIFKQPFMRPVQTTQEEDGCSCRFEEEEGGCELRVKFSRSADAPAYQQGQNQLYNELNLGRREEYDVLDKRRGRDPEMGGKPRRKNPQEGLYNELQKDKMAEAYSEIGMKGERRRGKGHDGLYQGLSTATKDTYDALHMQALPPRL

SEQ ID NO: 1939 - protein, 819 aa, synthetic construct
  REGION 1..819: note = source = /note="Description of Artificial Sequence: Synthetic polypeptide"
DIQMTQTTSSLSASLGDRVTISCRASQDISKYLNWYQQKPDGTVKLLIYHTSRLHSGVPSRFSGSGSGTDYSLTISNLEQEDIATYFCQQGNTLPYTFGGGTKLEITGSTSGSGKPGSGEGSTKGEVKLQESGPGLVAPSQSLSVTCTVSGVSLPDYGVSWIRQPPRKGLEWLGVIWGSETTYYNSALKSRLTIIKDNSKSQVFLKMNSLQTDDTAIYYCAKHYYYGGSYAMDYWGQGTSVTVSSESKYGPPCPPCPMFWVLVVVGGVLACYSLLVTVAFIIFWVKRGRKKLLYIFKQPFMRPVQTTQEEDGCSCRFEEEEGGCELRVKFSRSADAPAYQQGQNQLYNELNLGRREEYDVLDKRRGRDPEMGGKPRRKNPQEGLYNELQKDKMAEAYSEIGMKGERRRGKGHDGLYQGLSTATKDTYDALHMQALPPRLEGGGEGRGSLLTCGDVEENPGPRMLLLVTSLLLCELPHPAFLLIPRKVCNGIGIGEFKDSLSINATNIKHFKNCTSISGDLHILPVAFRGDSFTHTPPLDPQELDILKTVKEITGFLLIQAWPENRTDLHAFENLEIIRGRTKQHGQFSLAVVSLNITSLGLRSLKEISDGDVIISGNKNLCYANTINWKKLFGTSGQKTKIISNRGENSCKATGQVCHALCSPEGCWGPEPRDCVSCRNVSRGRECVDKCNLLEGEPREFVENSECIQCHPECLPQAMNITCTGRGPDNCIQCAHYIDGPHCVKTCPAGVMGENNTLVWKYADAGHVCHLCHPNCTYGCTGPGLEGCPTNGPKIPSIATGMVGALLLLLVVALGIGLFM

SEQ ID NO: 1940 - protein, 467 aa, synthetic construct
  REGION 1..467: note = source = /note="Description of Artificial Sequence: Synthetic polypeptide"
DIQMTQTTSSLSASLGDRVTISCRASQDISKYLNWYQQKPDGTVKLLIYHTSRLHSGVPSRFSGSGSGTDYSLTISNLEQEDIATYFCQQGNTLPYTFGGGTKLEITGSTSGSGKPGSGEGSTKGEVKLQESGPGLVAPSQSLSVTCTVSGVSLPDYGVSWIRQPPRKGLEWLGVIWGSETTYYNSALKSRLTIIKDNSKSQVFLKMNSLQTDDTAIYYCAKHYYYGGSYAMDYWGQGTSVTVSSAAAIEVMYPPPYLDNEKSNGTIIHVKGKHLCPSPLFPGPSKPFWVLVVVGGVLACYSLLVTVAFIIFWVRSKRSRLLHSDYMNMTPRRPGPTRKHYQPYAPPRDFAAYRSRVKFSRSADAPAYQQGQNQLYNELNLGRREEYDVLDKRRGRDPEMGGKPRRKNPQEGLYNELQKDKMAEAYSEIGMKGERRRGKGHDGLYQGLSTATKDTYDALHMQALPPR

SEQ ID NO: 1941 - protein, 111 aa, synthetic construct
  REGION 1..111: note = source = /note="Description of Artificial Sequence: Synthetic polypeptide"
ELVLTQSPKFMSTSVGDRVSVTCKASQNVGTNVAWYQQKPGQSPKPLIYSATYRNSGVPDRFTGSGSGTDFTLTITNVQSKDLADYFYFCQYNRYPYTSGGGTKLEIKRRS

SEQ ID NO: 1942 - DNA, 63 bp, synthetic construct
  misc_feature 1..63: note = source = /note="Description of Artificial Sequence: Synthetic oligonucleotide"
  source 1..63: mol_type = other DNA
atggccctccctgtcaccgccctgctgcttccgctggctcttctgctccacgccgctcggccc

SEQ ID NO: 1943 - DNA, 72 bp, synthetic construct
  misc_feature 1..72: note = source = /note="Description of Artificial Sequence: Synthetic oligonucleotide"
  source 1..72: mol_type = other DNA
atctacatttgggcccctctggctggtacttgcggggtcctgctgctttcactcgtgatcactctttactgt

SEQ ID NO: 1944 - DNA, 126 bp, synthetic construct
  misc_feature 1..126: note = source = /note="Description of Artificial Sequence: Synthetic polynucleotide"
  source 1..126: mol_type = other DNA
aagcgcggtcggaagaagctgctgtacatctttaagcaacccttcatgaggcctgtgcagactactcaagaggaggacggctgttcatgccggttcccagaggaggaggaaggcggctgcgaactg

SEQ ID NO: 1945 - DNA, 336 bp, synthetic construct
  misc_feature 1..336: note = source = /note="Description of Artificial Sequence: Synthetic polynucleotide"
  source 1..336: mol_type = other DNA
cgcgtgaaattcagccgcagcgcagatgctccagcctacaagcaggggcagaaccagctctacaacgaactcaatcttggtcggagagaggagtacgacgtgctggacaagcggagaggacgggacccagaaatgggcgggaagccgcgcagaaagaatccccaagagggcctgtacaacgagctccaaaaggataagatggcagaagcctatagcgagattggtatgaaaggggaacgcagaagaggcaaaggccacgacggactgtaccagggactcagcaccgccaccaaggacacctatgacgctcttcacatgcaggccctgccgcctcgg

SEQ ID NO: 1946 - RNA, 25 nt, synthetic construct
  misc_feature 1..25: note = source = /note="Description of Artificial Sequence: Synthetic oligonucleotide"
  source 1..25: mol_type = other RNA
gcgcgcagctcacacctggcggccg

SEQ ID NO: 1947 - RNA, 25 nt, synthetic construct
  misc_feature 1..25: note = source = /note="Description of Artificial Sequence: Synthetic oligonucleotide"
  source 1..25: mol_type = other RNA
ctcacacctggcggccgcggtttcc

SEQ ID NO: 1948 - RNA, 25 nt, synthetic construct
  misc_feature 1..25: note = source = /note="Description of Artificial Sequence: Synthetic oligonucleotide"
  source 1..25: mol_type = other RNA
acacctggcggccgcggtttccagg

SEQ ID NO: 1949 - RNA, 25 nt, synthetic construct
  misc_feature 1..25: note = source = /note="Description of Artificial Sequence: Synthetic oligonucleotide"
  source 1..25: mol_type = other RNA
cggccgcggtttccaggaggaagca

SEQ ID NO: 1950 - RNA, 25 nt, synthetic construct
  misc_feature 1..25: note = source = /note="Description of Artificial Sequence: Synthetic oligonucleotide"
  source 1..25: mol_type = other RNA
tttccaggaggaagcaaggatgctt

SEQ ID NO: 1951 - RNA, 25 nt, synthetic construct
  misc_feature 1..25: note = source = /note="Description of Artificial Sequence: Synthetic oligonucleotide"
  source 1..25: mol_type = other RNA
gcaaggatgctttggacactgtgcg

SEQ ID NO: 1952 - RNA, 25 nt, synthetic construct
  misc_feature 1..25: note = source = /note="Description of Artificial Sequence: Synthetic oligonucleotide"
  source 1..25: mol_type = other RNA
ttggacactgtgcgtggcgcctccg

SEQ ID NO: 1953 - RNA, 25 nt, synthetic construct
  misc_feature 1..25: note = source = /note="Description of Artificial Sequence: Synthetic oligonucleotide"
  source 1..25: mol_type = other RNA
cgcggagcccccgcgctgccattcc

SEQ ID NO: 1954 - RNA, 25 nt, synthetic construct
  misc_feature 1..25: note = source = /note="Description of Artificial Sequence: Synthetic oligonucleotide"
  source 1..25: mol_type = other RNA
cgcgctgccattcccggccgtcgct

SEQ ID NO: 1955 - RNA, 25 nt, synthetic construct
  misc_feature 1..25: note = source = /note="Description of Artificial Sequence: Synthetic oligonucleotide"
  source 1..25: mol_type = other RNA
cggccgtcgctcggtcctccgctga

SEQ ID NO: 1956 - RNA, 25 nt, synthetic construct
  misc_feature 1..25: note = source = /note="Description of Artificial Sequence: Synthetic oligonucleotide"
  source 1..25: mol_type = other RNA
ggccgtcgctcggtcctccgctgac

SEQ ID NO: 1957 - RNA, 25 nt, synthetic construct
  misc_feature 1..25: note = source = /note="Description of Artificial Sequence: Synthetic oligonucleotide"
  source 1..25: mol_type = other RNA
gctcggtcctccgctgacgggaagc

SEQ ID NO: 1958 - RNA, 25 nt, synthetic construct
  misc_feature 1..25: note = source = /note="Description of Artificial Sequence: Synthetic oligonucleotide"
  source 1..25: mol_type = other RNA
tcctccgctgacgggaagcaggaag

SEQ ID NO: 1959 - RNA, 25 nt, synthetic construct
  misc_feature 1..25: note = source = /note="Description of Artificial Sequence: Synthetic oligonucleotide"
  source 1..25: mol_type = other RNA
tccgctgacgggaagcaggaagtgg

SEQ ID NO: 1960 - RNA, 25 nt, synthetic construct
  misc_feature 1..25: note = source = /note="Description of Artificial Sequence: Synthetic oligonucleotide"
  source 1..25: mol_type = other RNA
gctgacgggaagcaggaagtggcgg

SEQ ID NO: 1961 - RNA, 25 nt, synthetic construct
  misc_feature 1..25: note = source = /note="Description of Artificial Sequence: Synthetic oligonucleotide"
  source 1..25: mol_type = other RNA
ctgacgggaagcaggaagtggcggc

SEQ ID NO: 1962 - RNA, 25 nt, synthetic construct
  misc_feature 1..25: note = source = /note="Description of Artificial Sequence: Synthetic oligonucleotide"
  source 1..25: mol_type = other RNA
aggaagtggcggcgggcgtcgcgag

SEQ ID NO: 1963 - RNA, 25 nt, synthetic construct
  misc_feature 1..25: note = source = /note="Description of Artificial Sequence: Synthetic oligonucleotide"
  source 1..25: mol_type = other RNA
gcgggcgtcgcgagcggtgacatca

SEQ ID NO: 1964 - RNA, 25 nt, synthetic construct
  misc_feature 1..25: note = source = /note="Description of Artificial Sequence: Synthetic oligonucleotide"
  source 1..25: mol_type = other RNA
cgggcgtcgcgagcggtgacatcac

SEQ ID NO: 1965 - RNA, 25 nt, synthetic construct
  misc_feature 1..25: note = source = /note="Description of Artificial Sequence: Synthetic oligonucleotide"
  source 1..25: mol_type = other RNA
gggcgtcgcgagcggtgacatcacg

SEQ ID NO: 1966 - RNA, 25 nt, synthetic construct
  misc_feature 1..25: note = source = /note="Description of Artificial Sequence: Synthetic oligonucleotide"
  source 1..25: mol_type = other RNA
ggcgtcgcgagcggtgacatcacgg

SEQ ID NO: 1967 - RNA, 25 nt, synthetic construct
  misc_feature 1..25: note = source = /note="Description of Artificial Sequence: Synthetic oligonucleotide"
  source 1..25: mol_type = other RNA
gcgagcggtgacatcacgggggcga

SEQ ID NO: 1968 - RNA, 25 nt, synthetic construct
  misc_feature 1..25: note = source = /note="Description of Artificial Sequence: Synthetic oligonucleotide"
  source 1..25: mol_type = other RNA
agcggtgacatcacgggggcgacgg

SEQ ID NO: 1969 - RNA, 25 nt, synthetic construct
  misc_feature 1..25: note = source = /note="Description of Artificial Sequence: Synthetic oligonucleotide"
  source 1..25: mol_type = other RNA
gacatcacgggggcgacggcggcga

SEQ ID NO: 1970 - RNA, 25 nt, synthetic construct
  misc_feature 1..25: note = source = /note="Description of Artificial Sequence: Synthetic oligonucleotide"
  source 1..25: mol_type = other RNA
acatcacgggggcgacggcggcgaa

SEQ ID NO: 1971 - RNA, 25 nt, synthetic construct
  misc_feature 1..25: note = source = /note="Description of Artificial Sequence: Synthetic oligonucleotide"
  source 1..25: mol_type = other RNA
tcacgggggcgacggcggcgaaggg

SEQ ID NO: 1972 - RNA, 25 nt, synthetic construct
  misc_feature 1..25: note = source = /note="Description of Artificial Sequence: Synthetic oligonucleotide"
  source 1..25: mol_type = other RNA
cacgggggcgacggcggcgaagggc

SEQ ID NO: 1973 - RNA, 25 nt, synthetic construct
  misc_feature 1..25: note = source = /note="Description of Artificial Sequence: Synthetic oligonucleotide"
  source 1..25: mol_type = other RNA
acgggggcgacggcggcgaagggcg

SEQ ID NO: 1974 - RNA, 25 nt, synthetic construct
  misc_feature 1..25: note = source = /note="Description of Artificial Sequence: Synthetic oligonucleotide"
  source 1..25: mol_type = other RNA
cgggggcgacggcggcgaagggcgg

SEQ ID NO: 1975 - RNA, 25 nt, synthetic construct
  misc_feature 1..25: note = source = /note="Description of Artificial Sequence: Synthetic oligonucleotide"
  source 1..25: mol_type = other RNA
gggcgacggcggcgaagggcggggg

SEQ ID NO: 1976 - RNA, 25 nt, synthetic construct
  misc_feature 1..25: note = source = /note="Description of Artificial Sequence: Synthetic oligonucleotide"
  source 1..25: mol_type = other RNA
cgacggcggcgaagggcgggggcgg

SEQ ID NO: 1977 - RNA, 25 nt, synthetic construct
  misc_feature 1..25: note = source = /note="Description of Artificial Sequence: Synthetic oligonucleotide"
  source 1..25: mol_type = other RNA
cggcggcgaagggcgggggcggagg

SEQ ID NO: 1978 - RNA, 25 nt, synthetic construct
  misc_feature 1..25: note = source = /note="Description of Artificial Sequence: Synthetic oligonucleotide"
  source 1..25: mol_type = other RNA
gggcgggggcggaggaggagcgagc

SEQ ID NO: 1979 - RNA, 25 nt, synthetic construct
  misc_feature 1..25: note = source = /note="Description of Artificial Sequence: Synthetic oligonucleotide"
  source 1..25: mol_type = other RNA
ggcgggggcggaggaggagcgagcc

SEQ ID NO: 1980 - RNA, 25 nt, synthetic construct
  misc_feature 1..25: note = source = /note="Description of Artificial Sequence: Synthetic oligonucleotide"
  source 1..25: mol_type = other RNA
ggggcggaggaggagcgagccgggc

SEQ ID NO: 1981 - RNA, 25 nt, synthetic construct
  misc_feature 1..25: note = source = /note="Description of Artificial Sequence: Synthetic oligonucleotide"
  source 1..25: mol_type = other RNA
gggcggaggaggagcgagccgggcc

SEQ ID NO: 1982 - RNA, 25 nt, synthetic construct
  misc_feature 1..25: note = source = /note="Description of Artificial Sequence: Synthetic oligonucleotide"
  source 1..25: mol_type = other RNA
ggcggaggaggagcgagccgggccg

SEQ ID NO: 1983 - RNA, 25 nt, synthetic construct
  misc_feature 1..25: note = source = /note="Description of Artificial Sequence: Synthetic oligonucleotide"
  source 1..25: mol_type = other RNA
gcggaggaggagcgagccgggccgg

SEQ ID NO: 1984 - RNA, 25 nt, synthetic construct
  misc_feature 1..25: note = source = /note="Description of Artificial Sequence: Synthetic oligonucleotide"
  source 1..25: mol_type = other RNA
cggaggaggagcgagccgggccggg

SEQ ID NO: 1985 - RNA, 25 nt, synthetic construct
  misc_feature 1..25: note = source = /note="Description of Artificial Sequence: Synthetic oligonucleotide"
  source 1..25: mol_type = other RNA
ggccggggggcagctgcacagtctc

SEQ ID NO: 1986 - RNA, 25 nt, synthetic construct
  misc_feature 1..25: note = source = /note="Description of Artificial Sequence: Synthetic oligonucleotide"
  source 1..25: mol_type = other RNA
gccggggggcagctgcacagtctcc

SEQ ID NO: 1987 - RNA, 25 nt, synthetic construct
  misc_feature 1..25: note = source = /note="Description of Artificial Sequence: Synthetic oligonucleotide"
  source 1..25: mol_type = other RNA
cagctgcacagtctccgggatcccc

SEQ ID NO: 1988 - RNA, 25 nt, synthetic construct
  misc_feature 1..25: note = source = /note="Description of Artificial Sequence: Synthetic oligonucleotide"
  source 1..25: mol_type = other RNA
gcacagtctccgggatccccaggcc

SEQ ID NO: 1989 - RNA, 25 nt, synthetic construct
  misc_feature 1..25: note = source = /note="Description of Artificial Sequence: Synthetic oligonucleotide"
  source 1..25: mol_type = other RNA
cagtctccgggatccccaggcctgg

SEQ ID NO: 1990 - RNA, 25 nt, synthetic construct
  misc_feature 1..25: note = source = /note="Description of Artificial Sequence: Synthetic oligonucleotide"
  source 1..25: mol_type = other RNA
agtctccgggatccccaggcctgga

SEQ ID NO: 1991 - RNA, 25 nt, synthetic construct
  misc_feature 1..25: note = source = /note="Description of Artificial Sequence: Synthetic oligonucleotide"
  source 1..25: mol_type = other RNA
gtctccgggatccccaggcctggag

SEQ ID NO: 1992 - RNA, 25 nt, synthetic construct
  misc_feature 1..25: note = source = /note="Description of Artificial Sequence: Synthetic oligonucleotide"
  source 1..25: mol_type = other RNA
tctccgggatccccaggcctggagg

SEQ ID NO: 1993 - RNA, 25 nt, synthetic construct
  misc_feature 1..25: note = source = /note="Description of Artificial Sequence: Synthetic oligonucleotide"
  source 1..25: mol_type = other RNA
ctccgggatccccaggcctggaggg

SEQ ID NO: 1994 - RNA, 25 nt, synthetic construct
  misc_feature 1..25: note = source = /note="Description of Artificial Sequence: Synthetic oligonucleotide"
  source 1..25: mol_type = other RNA
ccaggcctggaggggggtctgtgcg

SEQ ID NO: 1995 - RNA, 25 nt, synthetic construct
  misc_feature 1..25: note = source = /note="Description of Artificial Sequence: Synthetic oligonucleotide"
  source 1..25: mol_type = other RNA
gcctggaggggggtctgtgcgcggc

SEQ ID NO: 1996 - RNA, 25 nt, synthetic construct
  misc_feature 1..25: note = source = /note="Description of Artificial Sequence: Synthetic oligonucleotide"
  source 1..25: mol_type = other RNA
ggaggggggtctgtgcgcggccggc

SEQ ID NO: 1997 - RNA, 25 nt, synthetic construct
  misc_feature 1..25: note = source = /note="Description of Artificial Sequence: Synthetic oligonucleotide"
  source 1..25: mol_type = other RNA
cggccggctggctctgccccgcgtc

SEQ ID NO: 1998 - RNA, 25 nt, synthetic construct
  misc_feature 1..25: note = source = /note="Description of Artificial Sequence: Synthetic oligonucleotide"
  source 1..25: mol_type = other RNA
gctctgccccgcgtccggtcccgag

SEQ ID NO: 1999 - RNA, 25 nt, synthetic construct
  misc_feature 1..25: note = source = /note="Description of Artificial Sequence: Synthetic oligonucleotide"
  source 1..25: mol_type = other RNA
ctctgccccgcgtccggtcccgagc

SEQ ID NO: 2000 - RNA, 25 nt, synthetic construct
  misc_feature 1..25: note = source = /note="Description of Artificial Sequence: Synthetic oligonucleotide"
  source 1..25: mol_type = other RNA
cgtccggtcccgagcgggcctccct

SEQ ID NO: 2001 - RNA, 25 nt, synthetic construct
  misc_feature 1..25: note = source = /note="Description of Artificial Sequence: Synthetic oligonucleotide"
  source 1..25: mol_type = other RNA
gtccggtcccgagcgggcctccctc

SEQ ID NO: 2002 - RNA, 25 nt, synthetic construct
  misc_feature 1..25: note = source = /note="Description of Artificial Sequence: Synthetic oligonucleotide"
  source 1..25: mol_type = other RNA
gccagcccgatgtgaccgagcccag

SEQ ID NO: 2003 - RNA, 25 nt, synthetic construct
  misc_feature 1..25: note = source = /note="Description of Artificial Sequence: Synthetic oligonucleotide"
  source 1..25: mol_type = other RNA
gaccgagcccagcggagcctgagca

SEQ ID NO: 2004 - RNA, 25 nt, synthetic construct
  misc_feature 1..25: note = source = /note="Description of Artificial Sequence: Synthetic oligonucleotide"
  source 1..25: mol_type = other RNA
agcccagcggagcctgagcaaggag

SEQ ID NO: 2005 - RNA, 25 nt, synthetic construct
  misc_feature 1..25: note = source = /note="Description of Artificial Sequence: Synthetic oligonucleotide"
  source 1..25: mol_type = other RNA
gcccagcggagcctgagcaaggagc

SEQ ID NO: 2006 - RNA, 25 nt, synthetic construct
  misc_feature 1..25: note = source = /note="Description of Artificial Sequence: Synthetic oligonucleotide"
  source 1..25: mol_type = other RNA
gcctgagcaaggagcgggtccgtcg

SEQ ID NO: 2007 - RNA, 25 nt, synthetic construct
  misc_feature 1..25: note = source = /note="Description of Artificial Sequence: Synthetic oligonucleotide"
  source 1..25: mol_type = other RNA
gcaaggagcgggtccgtcgcggagc

SEQ ID NO: 2008 - RNA, 25 nt, synthetic construct
  misc_feature 1..25: note = source = /note="Description of Artificial Sequence: Synthetic oligonucleotide"
  source 1..25: mol_type = other RNA
aggagcgggtccgtcgcggagccgg

SEQ ID NO: 2009 - RNA, 25 nt, synthetic construct
  misc_feature 1..25: note = source = /note="Description of Artificial Sequence: Synthetic oligonucleotide"
  source 1..25: mol_type = other RNA
ggagcgggtccgtcgcggagccgga

SEQ ID NO: 2010 - RNA, 25 nt, synthetic construct
  misc_feature 1..25: note = source = /note="Description of Artificial Sequence: Synthetic oligonucleotide"
  source 1..25: mol_type = other RNA
gcgggtccgtcgcggagccggaggg

SEQ ID NO: 2011 - RNA, 25 nt, synthetic construct
  misc_feature 1..25: note = source = /note="Description of Artificial Sequence: Synthetic oligonucleotide"
  source 1..25: mol_type = other RNA
cgggtccgtcgcggagccggagggc

SEQ ID NO: 2012 - RNA, 25 nt, synthetic construct
  misc_feature 1..25: note = source = /note="Description of Artificial Sequence: Synthetic oligonucleotide"
  source 1..25: mol_type = other RNA
gtccgtcgcggagccggagggcggg

SEQ ID NO: 2013 - RNA, 25 nt, synthetic construct
  misc_feature 1..25: note = source = /note="Description of Artificial Sequence: Synthetic oligonucleotide"
  source 1..25: mol_type = other RNA
ggagggcgggaggaacatgacatcg

SEQ ID NO: 2014 - RNA, 25 nt, synthetic construct
  misc_feature 1..25: note = source = /note="Description of Artificial Sequence: Synthetic oligonucleotide"
  source 1..25: mol_type = other RNA
gggcgggaggaacatgacatcgcgg

SEQ ID NO: 2015 - RNA, 25 nt, synthetic construct
  misc_feature 1..25: note = source = /note="Description of Artificial Sequence: Synthetic oligonucleotide"
  source 1..25: mol_type = other RNA
ggaggaacatgacatcgcggaggtg

SEQ ID NO: 2016 - RNA, 25 nt, synthetic construct
  misc_feature 1..25: note = source = /note="Description of Artificial Sequence: Synthetic oligonucleotide"
  source 1..25: mol_type = other RNA
gacatcgcggaggtgaggagccccg

SEQ ID NO: 2017 - RNA, 25 nt, synthetic construct
  misc_feature 1..25: note = source = /note="Description of Artificial Sequence: Synthetic oligonucleotide"
  source 1..25: mol_type = other RNA
acatcgcggaggtgaggagccccga

SEQ ID NO: 2018 - RNA, 25 nt, synthetic construct
  misc_feature 1..25: note = source = /note="Description of Artificial Sequence: Synthetic oligonucleotide"
  source 1..25: mol_type = other RNA
catcgcggaggtgaggagccccgag

SEQ ID NO: 2019 - RNA, 25 nt, synthetic construct
  misc_feature 1..25: note = source = /note="Description of Artificial Sequence: Synthetic oligonucleotide"
  source 1..25: mol_type = other RNA
cttcctcctggaaaccgcggccgcc

SEQ ID NO: 2020 - RNA, 25 nt, synthetic construct
  misc_feature 1..25: note = source = /note="Description of Artificial Sequence: Synthetic oligonucleotide"
  source 1..25: mol_type = other RNA
catccttgcttcctcctggaaaccg

SEQ ID NO: 2021 - RNA, 25 nt, synthetic construct
  misc_feature 1..25: note = source = /note="Description of Artificial Sequence: Synthetic oligonucleotide"
  source 1..25: mol_type = other RNA
tgtccaaagcatccttgcttcctcc

SEQ ID NO: 2022 - RNA, 25 nt, synthetic construct
  misc_feature 1..25: note = source = /note="Description of Artificial Sequence: Synthetic oligonucleotide"
  source 1..25: mol_type = other RNA
gaatggcagcgcgggggctccgcgg

SEQ ID NO: 2023 - RNA, 25 nt, synthetic construct
  misc_feature 1..25: note = source = /note="Description of Artificial Sequence: Synthetic oligonucleotide"
  source 1..25: mol_type = other RNA
cgggaatggcagcgcgggggctccg

SEQ ID NO: 2024 - RNA, 25 nt, synthetic construct
  misc_feature 1..25: note = source = /note="Description of Artificial Sequence: Synthetic oligonucleotide"
  source 1..25: mol_type = other RNA
gcgacggccgggaatggcagcgcgg

SEQ ID NO: 2025 - RNA, 25 nt, synthetic construct
  misc_feature 1..25: note = source = /note="Description of Artificial Sequence: Synthetic oligonucleotide"
  source 1..25: mol_type = other RNA
agcgacggccgggaatggcagcgcg

SEQ ID NO: 2026 - RNA, 25 nt, synthetic construct
  misc_feature 1..25: note = source = /note="Description of Artificial Sequence: Synthetic oligonucleotide"
  source 1..25: mol_type = other RNA
gagcgacggccgggaatggcagcgc

SEQ ID NO: 2027 - RNA, 25 nt, synthetic construct
  misc_feature 1..25: note = source = /note="Description of Artificial Sequence: Synthetic oligonucleotide"
  source 1..25: mol_type = other RNA
cgagcgacggccgggaatggcagcg

SEQ ID NO: 2028 - RNA, 25 nt, synthetic construct
  misc_feature 1..25: note = source = /note="Description of Artificial Sequence: Synthetic oligonucleotide"
  source 1..25: mol_type = other RNA
cggaggaccgagcgacggccgggaa

SEQ ID NO: 2029 - RNA, 25 nt, synthetic construct
  misc_feature 1..25: note = source = /note="Description of Artificial Sequence: Synthetic oligonucleotide"
  source 1..25: mol_type = other RNA
gtcagcggaggaccgagcgacggcc

SEQ ID NO: 2030 - RNA, 25 nt, synthetic construct
  misc_feature 1..25: note = source = /note="Description of Artificial Sequence: Synthetic oligonucleotide"
  source 1..25: mol_type = other RNA
cgtcagcggaggaccgagcgacggc

SEQ ID NO: 2031 - RNA, 25 nt, synthetic construct
  misc_feature 1..25: note = source = /note="Description of Artificial Sequence: Synthetic oligonucleotide"
  source 1..25: mol_type = other RNA
ttcccgtcagcggaggaccgagcga

SEQ ID NO: 2032 - RNA, 25 nt, synthetic construct
  misc_feature 1..25: note = source = /note="Description of Artificial Sequence: Synthetic oligonucleotide"
  source 1..25: mol_type = other RNA
cggacttcctgcttcccgtcagcgg

SEQ ID NO: 2033 - RNA, 25 nt, synthetic construct
  misc_feature 1..25: note = source = /note="Description of Artificial Sequence: Synthetic oligonucleotide"
  source 1..25: mol_type = other RNA
cggcggacttcctgcttcccgtcag

SEQ ID NO: 2034 - RNA, 25 nt, synthetic construct
  misc_feature 1..25: note = source = /note="Description of Artificial Sequence: Synthetic oligonucleotide"
  source 1..25: mol_type = other RNA
gagactgtgcagctgcgggggccgg

SEQ ID NO: 2035 - RNA, 25 nt, synthetic construct
  misc_feature 1..25: note = source = /note="Description of Artificial Sequence: Synthetic oligonucleotide"
  source 1..25: mol_type = other RNA
tcccggagactgtgcagctgcgggg

SEQ ID NO: 2036 - RNA, 25 nt, synthetic construct
  misc_feature 1..25: note = source = /note="Description of Artificial Sequence: Synthetic oligonucleotide"
  source 1..25: mol_type = other RNA
gacccccctccaggcctggggatcc

SEQ ID NO: 2037 - RNA, 25 nt, synthetic construct
  misc_feature 1..25: note = source = /note="Description of Artificial Sequence: Synthetic oligonucleotide"
  source 1..25: mol_type = other RNA
gcgcacagacccccctccaggcctg

SEQ ID NO: 2038 - RNA, 25 nt, synthetic construct
  misc_feature 1..25: note = source = /note="Description of Artificial Sequence: Synthetic oligonucleotide"
  source 1..25: mol_type = other RNA
cgcgcacagacccccctccaggcct

SEQ ID NO: 2039 - RNA, 25 nt, synthetic construct
  misc_feature 1..25: note = source = /note="Description of Artificial Sequence: Synthetic oligonucleotide"
  source 1..25: mol_type = other RNA
ccgcgcacagacccccctccaggcc

SEQ ID NO: 2040 - RNA, 25 nt, synthetic construct
  misc_feature 1..25: note = source = /note="Description of Artificial Sequence: Synthetic oligonucleotide"
  source 1..25: mol_type = other RNA
gccggccgcgcacagacccccctcc

SEQ ID NO: 2041 - RNA, 25 nt, synthetic construct
  misc_feature 1..25: note = source = /note="Description of Artificial Sequence: Synthetic oligonucleotide"
  source 1..25: mol_type = other RNA
ggaccggacgcggggcagagccagc

SEQ ID NO: 2042 - RNA, 25 nt, synthetic construct
  misc_feature 1..25: note = source = /note="Description of Artificial Sequence: Synthetic oligonucleotide"
  source 1..25: mol_type = other RNA
ggaggcccgctcgggaccggacgcg

SEQ ID NO: 2043 - RNA, 25 nt, synthetic construct
  misc_feature 1..25: note = source = /note="Description of Artificial Sequence: Synthetic oligonucleotide"
  source 1..25: mol_type = other RNA
gggaggcccgctcgggaccggacgc

SEQ ID NO: 2044 - RNA, 25 nt, synthetic construct
  misc_feature 1..25: note = source = /note="Description of Artificial Sequence: Synthetic oligonucleotide"
  source 1..25: mol_type = other RNA
agggaggcccgctcgggaccggacg

SEQ ID NO: 2045 - RNA, 25 nt, synthetic construct
  misc_feature 1..25: note = source = /note="Description of Artificial Sequence: Synthetic oligonucleotide"
  source 1..25: mol_type = other RNA
ggcccgagggaggcccgctcgggac

SEQ ID NO: 2046 - RNA, 25 nt, synthetic construct
  misc_feature 1..25: note = source = /note="Description of Artificial Sequence: Synthetic oligonucleotide"
  source 1..25: mol_type = other RNA
gggctggcccgagggaggcccgctc

SEQ ID NO: 2047 - RNA, 25 nt, synthetic construct
  misc_feature 1..25: note = source = /note="Description of Artificial Sequence: Synthetic oligonucleotide"
  source 1..25: mol_type = other RNA
cgggctggcccgagggaggcccgct

SEQ ID NO: 2048 - RNA, 25 nt, synthetic construct
  misc_feature 1..25: note = source = /note="Description of Artificial Sequence: Synthetic oligonucleotide"
  source 1..25: mol_type = other RNA
cggtcacatcgggctggcccgaggg

SEQ ID NO: 2049 - RNA, 25 nt, synthetic construct
  misc_feature 1..25: note = source = /note="Description of Artificial Sequence: Synthetic oligonucleotide"
  source 1..25: mol_type = other RNA
gctcggtcacatcgggctggcccga

SEQ ID NO: 2050 - RNA, 25 nt, synthetic construct
  misc_feature 1..25: note = source = /note="Description of Artificial Sequence: Synthetic oligonucleotide"
  source 1..25: mol_type = other RNA
ggctcggtcacatcgggctggcccg

SEQ ID NO: 2051 - RNA, 25 nt, synthetic construct
  misc_feature 1..25: note = source = /note="Description of Artificial Sequence: Synthetic oligonucleotide"
  source 1..25: mol_type = other RNA
tccgctgggctcggtcacatcgggc

SEQ ID NO: 2052 - RNA, 25 nt, synthetic construct
  misc_feature 1..25: note = source = /note="Description of Artificial Sequence: Synthetic oligonucleotide"
  source 1..25: mol_type = other RNA
aggctccgctgggctcggtcacatc

SEQ ID NO: 2053 - RNA, 25 nt, synthetic construct
  misc_feature 1..25: note = source = /note="Description of Artificial Sequence: Synthetic oligonucleotide"
  source 1..25: mol_type = other RNA
caggctccgctgggctcggtcacat

SEQ ID NO: 2054 - RNA, 25 nt, synthetic construct
  misc_feature 1..25: note = source = /note="Description of Artificial Sequence: Synthetic oligonucleotide"
  source 1..25: mol_type = other RNA
ctccttgctcaggctccgctgggct

SEQ ID NO: 2055 - RNA, 25 nt, synthetic construct
  misc_feature 1..25: note = source = /note="Description of Artificial Sequence: Synthetic oligonucleotide"
  source 1..25: mol_type = other RNA
acccgctccttgctcaggctccgct

SEQ ID NO: 2056 - RNA, 25 nt, synthetic construct
  misc_feature 1..25: note = source = /note="Description of Artificial Sequence: Synthetic oligonucleotide"
  source 1..25: mol_type = other RNA
gacccgctccttgctcaggctccgc

SEQ ID NO: 2057 - RNA, 25 nt, synthetic construct
  misc_feature 1..25: note = source = /note="Description of Artificial Sequence: Synthetic oligonucleotide"
  source 1..25: mol_type = other RNA
tccgcgacggacccgctccttgctc

SEQ ID NO: 2058 - RNA, 25 nt, synthetic construct
  misc_feature 1..25: note = source = /note="Description of Artificial Sequence: Synthetic oligonucleotide"
  source 1..25: mol_type = other RNA
ttcctcccgccctccggctccgcga

SEQ ID NO: 2059 - RNA, 25 nt, synthetic construct
  misc_feature 1..25: note = source = /note="Description of Artificial Sequence: Synthetic oligonucleotide"
  source 1..25: mol_type = other RNA
gcgatgtcatgttcctcccgccctc

SEQ ID NO: 2060 - RNA, 25 nt, synthetic construct
  misc_feature 1..25: note = source = /note="Description of Artificial Sequence: Synthetic oligonucleotide"
  source 1..25: mol_type = other RNA
taagatggtttcacccaaatatcac

SEQ ID NO: 2061 - RNA, 25 nt, synthetic construct
  misc_feature 1..25: note = source = /note="Description of Artificial Sequence: Synthetic oligonucleotide"
  source 1..25: mol_type = other RNA
tggtttcacccaaatatcactggtg

SEQ ID NO: 2062 - RNA, 25 nt, synthetic construct
  misc_feature 1..25: note = source = /note="Description of Artificial Sequence: Synthetic oligonucleotide"
  source 1..25: mol_type = other RNA
tttcacccaaatatcactggtgtgg

SEQ ID NO: 2063 - RNA, 25 nt, synthetic construct
  misc_feature 1..25: note = source = /note="Description of Artificial Sequence: Synthetic oligonucleotide"
  source 1..25: mol_type = other RNA
aggcagaaaacctactgttgacaag

SEQ ID NO: 2064 - RNA, 25 nt, synthetic construct
  misc_feature 1..25: note = source = /note="Description of Artificial Sequence: Synthetic oligonucleotide"
  source 1..25: mol_type = other RNA
acctactgttgacaagaggagttga

SEQ ID NO: 2065 - RNA, 25 nt, synthetic construct
  misc_feature 1..25: note = source = /note="Description of Artificial Sequence: Synthetic oligonucleotide"
  source 1..25: mol_type = other RNA
acaagaggagttgatggcagttttt

SEQ ID NO: 2066 - RNA, 25 nt, synthetic construct
  misc_feature 1..25: note = source = /note="Description of Artificial Sequence: Synthetic oligonucleotide"
  source 1..25: mol_type = other RNA
aggagttgatggcagttttttggca

SEQ ID NO: 2067 - RNA, 25 nt, synthetic construct
  misc_feature 1..25: note = source = /note="Description of Artificial Sequence: Synthetic oligonucleotide"
  source 1..25: mol_type = other RNA
tggcaaggcctagtaaaagtaaccc

SEQ ID NO: 2068 - RNA, 25 nt, synthetic construct
  misc_feature 1..25: note = source = /note="Description of Artificial Sequence: Synthetic oligonucleotide"
  source 1..25: mol_type = other RNA
ccctggagacttcacactttccgtt

SEQ ID NO: 2069 - RNA, 25 nt, synthetic construct
  misc_feature 1..25: note = source = /note="Description of Artificial Sequence: Synthetic oligonucleotide"
  source 1..25: mol_type = other RNA
acttcacactttccgttaggtaagt

SEQ ID NO: 2070 - RNA, 25 nt, synthetic construct
  misc_feature 1..25: note = source = /note="Description of Artificial Sequence: Synthetic oligonucleotide"
  source 1..25: mol_type = other RNA
ttctgcctccacaccagtgatattt

SEQ ID NO: 2071 - RNA, 25 nt, synthetic construct
  misc_feature 1..25: note = source = /note="Description of Artificial Sequence: Synthetic oligonucleotide"
  source 1..25: mol_type = other RNA
tttctgcctccacaccagtgatatt

SEQ ID NO: 2072 - RNA, 25 nt, synthetic construct
  misc_feature 1..25: note = source = /note="Description of Artificial Sequence: Synthetic oligonucleotide"
  source 1..25: mol_type = other RNA
gccatcaactcctcttgtcaacagt

SEQ ID NO: 2073 - RNA, 25 nt, synthetic construct
  misc_feature 1..25: note = source = /note="Description of Artificial Sequence: Synthetic oligonucleotide"
  source 1..25: mol_type = other RNA
tgaagtctccagggttacttttact

SEQ ID NO: 2074 - RNA, 25 nt, synthetic construct
  misc_feature 1..25: note = source = /note="Description of Artificial Sequence: Synthetic oligonucleotide"
  source 1..25: mol_type = other RNA
cctaacggaaagtgtgaagtctcca

SEQ ID NO: 2075 - RNA, 25 nt, synthetic construct
  misc_feature 1..25: note = source = /note="Description of Artificial Sequence: Synthetic oligonucleotide"
  source 1..25: mol_type = other RNA
acctaacggaaagtgtgaagtctcc

SEQ ID NO: 2076 - RNA, 25 nt, synthetic construct
  misc_feature 1..25: note = source = /note="Description of Artificial Sequence: Synthetic oligonucleotide"
  source 1..25: mol_type = other RNA
ttccaatggactattttagaagaaa

SEQ ID NO: 2077 - RNA, 25 nt, synthetic construct
  misc_feature 1..25: note = source = /note="Description of Artificial Sequence: Synthetic oligonucleotide"
  source 1..25: mol_type = other RNA
tcacccacatcaagattcagaacac

SEQ ID NO: 2078 - RNA, 25 nt, synthetic construct
  misc_feature 1..25: note = source = /note="Description of Artificial Sequence: Synthetic oligonucleotide"
  source 1..25: mol_type = other RNA
acactggtgattactatgacctgta

SEQ ID NO: 2079 - RNA, 25 nt, synthetic construct
  misc_feature 1..25: note = source = /note="Description of Artificial Sequence: Synthetic oligonucleotide"
  source 1..25: mol_type = other RNA
ctggtgattactatgacctgtatgg

SEQ ID NO: 2080 - RNA, 25 nt, synthetic construct
  misc_feature 1..25: note = source = /note="Description of Artificial Sequence: Synthetic oligonucleotide"
  source 1..25: mol_type = other RNA
tggtgattactatgacctgtatgga

SEQ ID NO: 2081 - RNA, 25 nt, synthetic construct
  misc_feature 1..25: note = source = /note="Description of Artificial Sequence: Synthetic oligonucleotide"
  source 1..25: mol_type = other RNA
ggtgattactatgacctgtatggag

SEQ ID NO: 2082 - RNA, 25 nt, synthetic construct
  misc_feature 1..25: note = source = /note="Description of Artificial Sequence: Synthetic oligonucleotide"
  source 1..25: mol_type = other RNA
tatggaggggagaaatttgccactt

SEQ ID NO: 2083 - RNA, 25 nt, synthetic construct
  misc_feature 1..25: note = source = /note="Description of Artificial Sequence: Synthetic oligonucleotide"
  source 1..25: mol_type = other RNA
gagaaatttgccactttggctgagt

SEQ ID NO: 2084 - RNA, 25 nt, synthetic construct
  misc_feature 1..25: note = source = /note="Description of Artificial Sequence: Synthetic oligonucleotide"
  source 1..25: mol_type = other RNA
ttggctgagttggtccagtattaca

SEQ ID NO: 2085 - RNA, 25 nt, synthetic construct
  misc_feature 1..25: note = source = /note="Description of Artificial Sequence: Synthetic oligonucleotide"
  source 1..25: mol_type = other RNA
tggtccagtattacatggaacatca

SEQ ID NO: 2086 - RNA, 25 nt, synthetic construct
  misc_feature 1..25: note = source = /note="Description of Artificial Sequence: Synthetic oligonucleotide"
  source 1..25: mol_type = other RNA
ggtccagtattacatggaacatcac

SEQ ID NO: 2087 - RNA, 25 nt, synthetic construct
  misc_feature 1..25: note = source = /note="Description of Artificial Sequence: Synthetic oligonucleotide"
  source 1..25: mol_type = other RNA
atcacgggcaattaaaagagaagaa

SEQ ID NO: 2088 - RNA, 25 nt, synthetic construct
  misc_feature 1..25: note = source = /note="Description of Artificial Sequence: Synthetic oligonucleotide"
  source 1..25: mol_type = other RNA
gaactgtgcagatcctacctctgaa

SEQ ID NO: 2089 - RNA, 25 nt, synthetic construct
  misc_feature 1..25: note = source = /note="Description of Artificial Sequence: Synthetic oligonucleotide"
  source 1..25: mol_type = other RNA
ctccatttcttctaaaatagtccat

SEQ ID NO: 2090 - RNA, 25 nt, synthetic construct
  misc_feature 1..25: note = source = /note="Description of Artificial Sequence: Synthetic oligonucleotide"
  source 1..25: mol_type = other RNA
tcaccagtgttctgaatcttgatgt

SEQ ID NO: 2091 - RNA, 25 nt, synthetic construct
  misc_feature 1..25: note = source = /note="Description of Artificial Sequence: Synthetic oligonucleotide"
  source 1..25: mol_type = other RNA
atcaccagtgttctgaatcttgatg

SEQ ID NO: 2092 - RNA, 25 nt, synthetic construct
  misc_feature 1..25: note = source = /note="Description of Artificial Sequence: Synthetic oligonucleotide"
  source 1..25: mol_type = other RNA
agtggcaaatttctcccctccatac

SEQ ID NO: 2093 - RNA, 25 nt, synthetic construct
  misc_feature 1..25: note = source = /note="Description of Artificial Sequence: Synthetic oligonucleotide"
  source 1..25: mol_type = other RNA
taatactggaccaactcagccaaag

SEQ ID NO: 2094 - RNA, 25 nt, synthetic construct
  misc_feature 1..25: note = source = /note="Description of Artificial Sequence: Synthetic oligonucleotide"
  source 1..25: mol_type = other RNA
ttgcccgtgatgttccatgtaatac

SEQ ID NO: 2095 - RNA, 25 nt, synthetic construct
  misc_feature 1..25: note = source = /note="Description of Artificial Sequence: Synthetic oligonucleotide"
  source 1..25: mol_type = other RNA
cagaggtaggatctgcacagttcag

SEQ ID NO: 2096 - RNA, 25 nt, synthetic construct
  misc_feature 1..25: note = source = /note="Description of Artificial Sequence: Synthetic oligonucleotide"
  source 1..25: mol_type = other RNA
aaaatgttactgacctttcagaggt

SEQ ID NO: 2097 - RNA, 25 nt, synthetic construct
  misc_feature 1..25: note = source = /note="Description of Artificial Sequence: Synthetic oligonucleotide"
  source 1..25: mol_type = other RNA
cactaaaatgttactgacctttcag

SEQ ID NO: 2098 - RNA, 25 nt, synthetic construct
  misc_feature 1..25: note = source = /note="Description of Artificial Sequence: Synthetic oligonucleotide"
  source 1..25: mol_type = other RNA
tttttaaaaactttaggtggtttca

SEQ ID NO: 2099 - RNA, 25 nt, synthetic construct
  misc_feature 1..25: note = source = /note="Description of Artificial Sequence: Synthetic oligonucleotide"
  source 1..25: mol_type = other RNA
ttaggtggtttcatggacatctctc

SEQ ID NO: 2100 - RNA, 25 nt, synthetic construct
  misc_feature 1..25: note = source = /note="Description of Artificial Sequence: Synthetic oligonucleotide"
  source 1..25: mol_type = other RNA
taggtggtttcatggacatctctct

SEQ ID NO: 2101 - RNA, 25 nt, synthetic construct
  misc_feature 1..25: note = source = /note="Description of Artificial Sequence: Synthetic oligonucleotide"
  source 1..25: mol_type = other RNA
aagcagagaaattattaactgaaaa

SEQ ID NO: 2102 - RNA, 25 nt, synthetic construct
  misc_feature 1..25: note = source = /note="Description of Artificial Sequence: Synthetic oligonucleotide"
  source 1..25: mol_type = other RNA
aattattaactgaaaaaggaaaaca

SEQ ID NO: 2103 - RNA, 25 nt, synthetic construct
  misc_feature 1..25: note = source = /note="Description of Artificial Sequence: Synthetic oligonucleotide"
  source 1..25: mol_type = other RNA
ttgtacgagagagccagagccaccc

SEQ ID NO: 2104 - RNA, 25 nt, synthetic construct
  misc_feature 1..25: note = source = /note="Description of Artificial Sequence: Synthetic oligonucleotide"
  source 1..25: mol_type = other RNA
gagattttgttctttctgtgcgcac

SEQ ID NO: 2105 - RNA, 25 nt, synthetic construct
  misc_feature 1..25: note = source = /note="Description of Artificial Sequence: Synthetic oligonucleotide"
  source 1..25: mol_type = other RNA
tttctgtgcgcactggtgatgacaa

SEQ ID NO: 2106 - RNA, 25 nt, synthetic construct
  misc_feature 1..25: note = source = /note="Description of Artificial Sequence: Synthetic oligonucleotide"
  source 1..25: mol_type = other RNA
ttctgtgcgcactggtgatgacaaa

SEQ ID NO: 2107 - RNA, 25 nt, synthetic construct
  misc_feature 1..25: note = source = /note="Description of Artificial Sequence: Synthetic oligonucleotide"
  source 1..25: mol_type = other RNA
tctgtgcgcactggtgatgacaaag

SEQ ID NO: 2108 - RNA, 25 nt, synthetic construct
  misc_feature 1..25: note = source = /note="Description of Artificial Sequence: Synthetic oligonucleotide"
  source 1..25: mol_type = other RNA
gtgatgacaaaggggagagcaatga

SEQ ID NO: 2109 - RNA, 25 nt, synthetic construct
  misc_feature 1..25: note = source = /note="Description of Artificial Sequence: Synthetic oligonucleotide"
  source 1..25: mol_type = other RNA
gtgacccatgttatgattcgctgtc

SEQ ID NO: 2110 - RNA, 25 nt, synthetic construct
  misc_feature 1..25: note = source = /note="Description of Artificial Sequence: Synthetic oligonucleotide"
  source 1..25: mol_type = other RNA
aagaacaaaatctccagggtggctc

SEQ ID NO: 2111 - RNA, 25 nt, synthetic construct
  misc_feature 1..25: note = source = /note="Description of Artificial Sequence: Synthetic oligonucleotide"
  source 1..25: mol_type = other RNA
cacagaaagaacaaaatctccaggg

SEQ ID NO: 2112 - RNA, 25 nt, synthetic construct
  misc_feature 1..25: note = source = /note="Description of Artificial Sequence: Synthetic oligonucleotide"
  source 1..25: mol_type = other RNA
gcgcacagaaagaacaaaatctcca

SEQ ID NO: 2113 - RNA, 25 nt, synthetic construct
  misc_feature 1..25: note = source = /note="Description of Artificial Sequence: Synthetic oligonucleotide"
  source 1..25: mol_type = other RNA
tgcgcacagaaagaacaaaatctcc

SEQ ID NO: 2114 - RNA, 25 nt, synthetic construct
  misc_feature 1..25: note = source = /note="Description of Artificial Sequence: Synthetic oligonucleotide"
  source 1..25: mol_type = other RNA
tttacctgacagcgaatcataacat

SEQ ID NO: 2115 - RNA, 25 nt, synthetic construct
  misc_feature 1..25: note = source = /note="Description of Artificial Sequence: Synthetic oligonucleotide"
  source 1..25: mol_type = other RNA
atttacctgacagcgaatcataaca

SEQ ID NO: 2116 - RNA, 25 nt, synthetic construct
  misc_feature 1..25: note = source = /note="Description of Artificial Sequence: Synthetic oligonucleotide"
  source 1..25: mol_type = other RNA
cttgaaaggaactgaaatacgacgt

SEQ ID NO: 2117 - RNA, 25 nt, synthetic construct
  misc_feature 1..25: note = source = /note="Description of Artificial Sequence: Synthetic oligonucleotide"
  source 1..25: mol_type = other RNA
gaaaggaactgaaatacgacgttgg

SEQ ID NO: 2118 - RNA, 25 nt, synthetic construct
  misc_feature 1..25: note = source = /note="Description of Artificial Sequence: Synthetic oligonucleotide"
  source 1..25: mol_type = other RNA
aggaactgaaatacgacgttggtgg

SEQ ID NO: 2119 - RNA, 25 nt, synthetic construct
  misc_feature 1..25: note = source = /note="Description of Artificial Sequence: Synthetic oligonucleotide"
  source 1..25: mol_type = other RNA
gaaatacgacgttggtggaggagaa

SEQ ID NO: 2120 - RNA, 25 nt, synthetic construct
  misc_feature 1..25: note = source = /note="Description of Artificial Sequence: Synthetic oligonucleotide"
  source 1..25: mol_type = other RNA
cggtttgattctttgacagatcttg

SEQ ID NO: 2121 - RNA, 25 nt, synthetic construct
  misc_feature 1..25: note = source = /note="Description of Artificial Sequence: Synthetic oligonucleotide"
  source 1..25: mol_type = other RNA
gtggaacattataagaagaatccta

SEQ ID NO: 2122 - RNA, 25 nt, synthetic construct
  misc_feature 1..25: note = source = /note="Description of Artificial Sequence: Synthetic oligonucleotide"
  source 1..25: mol_type = other RNA
gaacattataagaagaatcctatgg

SEQ ID NO: 2123 - RNA, 25 nt, synthetic construct
  misc_feature 1..25: note = source = /note="Description of Artificial Sequence: Synthetic oligonucleotide"
  source 1..25: mol_type = other RNA
aagaagaatcctatggtggaaacat

SEQ ID NO: 2124 - RNA, 25 nt, synthetic construct
  misc_feature 1..25: note = source = /note="Description of Artificial Sequence: Synthetic oligonucleotide"
  source 1..25: mol_type = other RNA
agaagaatcctatggtggaaacatt

SEQ ID NO: 2125 - RNA, 25 nt, synthetic construct
  misc_feature 1..25: note = source = /note="Description of Artificial Sequence: Synthetic oligonucleotide"
  source 1..25: mol_type = other RNA
ttgggtacagtactacaactcaagc

SEQ ID NO: 2126 - RNA, 25 nt, synthetic construct
  misc_feature 1..25: note = source = /note="Description of Artificial Sequence: Synthetic oligonucleotide"
  source 1..25: mol_type = other RNA
ctacaactcaagcaggtgagcagat

SEQ ID NO: 2127 - RNA, 25 nt, synthetic construct
  misc_feature 1..25: note = source = /note="Description of Artificial Sequence: Synthetic oligonucleotide"
  source 1..25: mol_type = other RNA
gtactgtacccaatgtttccaccat

SEQ ID NO: 2128 - RNA, 25 nt, synthetic construct
  misc_feature 1..25: note = source = /note="Description of Artificial Sequence: Synthetic oligonucleotide"
  source 1..25: mol_type = other RNA
ctgagaccacagataaagtcaaaca

SEQ ID NO: 2129 - RNA, 25 nt, synthetic construct
  misc_feature 1..25: note = source = /note="Description of Artificial Sequence: Synthetic oligonucleotide"
  source 1..25: mol_type = other RNA
cacagataaagtcaaacaaggcttt

SEQ ID NO: 2130 - RNA, 25 nt, synthetic construct
  misc_feature 1..25: note = source = /note="Description of Artificial Sequence: Synthetic oligonucleotide"
  source 1..25: mol_type = other RNA
acagataaagtcaaacaaggctttt

SEQ ID NO: 2131 - RNA, 25 nt, synthetic construct
  misc_feature 1..25: note = source = /note="Description of Artificial Sequence: Synthetic oligonucleotide"
  source 1..25: mol_type = other RNA
aaacaaggcttttgggaagaatttg

SEQ ID NO: 2132 - RNA, 25 nt, synthetic construct
  misc_feature 1..25: note = source = /note="Description of Artificial Sequence: Synthetic oligonucleotide"
  source 1..25: mol_type = other RNA
cagcatttatacgagtcgtgttaag

SEQ ID NO: 2133 - RNA, 25 nt, synthetic construct
  misc_feature 1..25: note = source = /note="Description of Artificial Sequence: Synthetic oligonucleotide"
  source 1..25: mol_type = other RNA
gcagcatttatacgagtcgtgttaa

SEQ ID NO: 2134 - RNA, 25 nt, synthetic construct
  misc_feature 1..25: note = source = /note="Description of Artificial Sequence: Synthetic oligonucleotide"
  source 1..25: mol_type = other RNA
agcagcatttatacgagtcgtgtta

SEQ ID NO: 2135 - RNA, 25 nt, synthetic construct
  misc_feature 1..25: note = source = /note="Description of Artificial Sequence: Synthetic oligonucleotide"
  source 1..25: mol_type = other RNA
caaaagccttgtttgactttatctg

SEQ ID NO: 2136 - RNA, 25 nt, synthetic construct
  misc_feature 1..25: note = source = /note="Description of Artificial Sequence: Synthetic oligonucleotide"
  source 1..25: mol_type = other RNA
ctttctttccagacactacaacaac

SEQ ID NO: 2137 - RNA, 25 nt, synthetic construct
  misc_feature 1..25: note = source = /note="Description of Artificial Sequence: Synthetic oligonucleotide"
  source 1..25: mol_type = other RNA
tgcaaacttctctacagccgaaaag

SEQ ID NO: 2138 - RNA, 25 nt, synthetic construct
  misc_feature 1..25: note = source = /note="Description of Artificial Sequence: Synthetic oligonucleotide"
  source 1..25: mol_type = other RNA
gcaaacttctctacagccgaaaaga

SEQ ID NO: 2139 - RNA, 25 nt, synthetic construct
  misc_feature 1..25: note = source = /note="Description of Artificial Sequence: Synthetic oligonucleotide"
  source 1..25: mol_type = other RNA
tctctacagccgaaaagagggtcaa

SEQ ID NO: 2140 - RNA, 25 nt, synthetic construct
  misc_feature 1..25: note = source = /note="Description of Artificial Sequence: Synthetic oligonucleotide"
  source 1..25: mol_type = other RNA
tttgcactcctgttgttgtagtgtc

SEQ ID NO: 2141 - RNA, 25 nt, synthetic construct
  misc_feature 1..25: note = source = /note="Description of Artificial Sequence: Synthetic oligonucleotide"
  source 1..25: mol_type = other RNA
gttttcttgcctttgaccctctttt

SEQ ID NO: 2142 - RNA, 25 nt, synthetic construct
  misc_feature 1..25: note = source = /note="Description of Artificial Sequence: Synthetic oligonucleotide"
  source 1..25: mol_type = other RNA
agcggaatattgatacttacagggc

SEQ ID NO: 2143 - RNA, 25 nt, synthetic construct
  misc_feature 1..25: note = source = /note="Description of Artificial Sequence: Synthetic oligonucleotide"
  source 1..25: mol_type = other RNA
tctttttcttctagttgatcatacc

SEQ ID NO: 2144 - RNA, 25 nt, synthetic construct
  misc_feature 1..25: note = source = /note="Description of Artificial Sequence: Synthetic oligonucleotide"
  source 1..25: mol_type = other RNA
ctttttcttctagttgatcatacca

SEQ ID NO: 2145 - RNA, 25 nt, synthetic construct
  misc_feature 1..25: note = source = /note="Description of Artificial Sequence: Synthetic oligonucleotide"
  source 1..25: mol_type = other RNA
atcataccagggttgtcctacacga

SEQ ID NO: 2146 - RNA, 25 nt, synthetic construct
  misc_feature 1..25: note = source = /note="Description of Artificial Sequence: Synthetic oligonucleotide"
  source 1..25: mol_type = other RNA
gattacatcaatgcaaatatcatca

SEQ ID NO: 2147 - RNA, 25 nt, synthetic construct
  misc_feature 1..25: note = source = /note="Description of Artificial Sequence: Synthetic oligonucleotide"
  source 1..25: mol_type = other RNA
ggatcaccatcgtgtaggacaaccc

SEQ ID NO: 2148 - RNA, 25 nt, synthetic construct
  misc_feature 1..25: note = source = /note="Description of Artificial Sequence: Synthetic oligonucleotide"
  source 1..25: mol_type = other RNA
aggctcattgggatcaccatcgtgt

SEQ ID NO: 2149 - RNA, 25 nt, synthetic construct
  misc_feature 1..25: note = source = /note="Description of Artificial Sequence: Synthetic oligonucleotide"
  source 1..25: mol_type = other RNA
tgatgtaatctgaaacaggctcatt

SEQ ID NO: 2150 - RNA, 25 nt, synthetic construct
  misc_feature 1..25: note = source = /note="Description of Artificial Sequence: Synthetic oligonucleotide"
  source 1..25: mol_type = other RNA
ttgatgtaatctgaaacaggctcat

SEQ ID NO: 2151 - RNA, 25 nt, synthetic construct
  misc_feature 1..25: note = source = /note="Description of Artificial Sequence: Synthetic oligonucleotide"
  source 1..25: mol_type = other RNA
tatttgcattgatgtaatctgaaac

SEQ ID NO: 2152 - RNA, 25 nt, synthetic construct
  misc_feature 1..25: note = source = /note="Description of Artificial Sequence: Synthetic oligonucleotide"
  source 1..25: mol_type = other RNA
ccaaaaagagttacattgccacaca

SEQ ID NO: 2153 - RNA, 25 nt, synthetic construct
  misc_feature 1..25: note = source = /note="Description of Artificial Sequence: Synthetic oligonucleotide"
  source 1..25: mol_type = other RNA
gccacacaaggctgcctgcaaaaca

SEQ ID NO: 2154 - RNA, 25 nt, synthetic construct
  misc_feature 1..25: note = source = /note="Description of Artificial Sequence: Synthetic oligonucleotide"
  source 1..25: mol_type = other RNA
cctgcaaaacacggtgaatgacttt

SEQ ID NO: 2155 - RNA, 25 nt, synthetic construct
  misc_feature 1..25: note = source = /note="Description of Artificial Sequence: Synthetic oligonucleotide"
  source 1..25: mol_type = other RNA
gcaaaacacggtgaatgacttttgg

SEQ ID NO: 2156 - RNA, 25 nt, synthetic construct
  misc_feature 1..25: note = source = /note="Description of Artificial Sequence: Synthetic oligonucleotide"
  source 1..25: mol_type = other RNA
aacacggtgaatgacttttggcgga

SEQ ID NO: 2157 - RNA, 25 nt, synthetic construct
  misc_feature 1..25: note = source = /note="Description of Artificial Sequence: Synthetic oligonucleotide"
  source 1..25: mol_type = other RNA
gtgattgtcatgacaacgaaagaag

SEQ ID NO: 2158 - RNA, 25 nt, synthetic construct
  misc_feature 1..25: note = source = /note="Description of Artificial Sequence: Synthetic oligonucleotide"
  source 1..25: mol_type = other RNA
tcatgacaacgaaagaagtggagag

SEQ ID NO: 2159 - RNA, 25 nt, synthetic construct
  misc_feature 1..25: note = source = /note="Description of Artificial Sequence: Synthetic oligonucleotide"
  source 1..25: mol_type = other RNA
acaacgaaagaagtggagagaggaa

SEQ ID NO: 2160 - RNA, 25 nt, synthetic construct
  misc_feature 1..25: note = source = /note="Description of Artificial Sequence: Synthetic oligonucleotide"
  source 1..25: mol_type = other RNA
ggtttcaaattcaggctagaaattt

SEQ ID NO: 2161 - RNA, 25 nt, synthetic construct
  misc_feature 1..25: note = source = /note="Description of Artificial Sequence: Synthetic oligonucleotide"
  source 1..25: mol_type = other RNA
aattgttgcacttggtttcaaattc

SEQ ID NO: 2162 - RNA, 25 nt, synthetic construct
  misc_feature 1..25: note = source = /note="Description of Artificial Sequence: Synthetic oligonucleotide"
  source 1..25: mol_type = other RNA
tttttgggctttgaattgttgcact

SEQ ID NO: 2163 - RNA, 25 nt, synthetic construct
  misc_feature 1..25: note = source = /note="Description of Artificial Sequence: Synthetic oligonucleotide"
  source 1..25: mol_type = other RNA
cttgtgtggcaatgtaactcttttt

SEQ ID NO: 2164 - RNA, 25 nt, synthetic construct
  misc_feature 1..25: note = source = /note="Description of Artificial Sequence: Synthetic oligonucleotide"
  source 1..25: mol_type = other RNA
ccttgtgtggcaatgtaactctttt

SEQ ID NO: 2165 - RNA, 25 nt, synthetic construct
  misc_feature 1..25: note = source = /note="Description of Artificial Sequence: Synthetic oligonucleotide"
  source 1..25: mol_type = other RNA
accgtgttttgcaggcagccttgtg

SEQ ID NO: 2166 - RNA, 25 nt, synthetic construct
  misc_feature 1..25: note = source = /note="Description of Artificial Sequence: Synthetic oligonucleotide"
  source 1..25: mol_type = other RNA
ccaaaagtcattcaccgtgttttgc

SEQ ID NO: 2167 - RNA, 25 nt, synthetic construct
  misc_feature 1..25: note = source = /note="Description of Artificial Sequence: Synthetic oligonucleotide"
  source 1..25: mol_type = other RNA
catgacaatcactcgggagttttct

SEQ ID NO: 2168 - RNA, 25 nt, synthetic construct
  misc_feature 1..25: note = source = /note="Description of Artificial Sequence: Synthetic oligonucleotide"
  source 1..25: mol_type = other RNA
tctttcgttgtcatgacaatcactc

SEQ ID NO: 2169 - RNA, 25 nt, synthetic construct
  misc_feature 1..25: note = source = /note="Description of Artificial Sequence: Synthetic oligonucleotide"
  source 1..25: mol_type = other RNA
ttctttcgttgtcatgacaatcact

SEQ ID NO: 2170 - RNA, 25 nt, synthetic construct
  misc_feature 1..25: note = source = /note="Description of Artificial Sequence: Synthetic oligonucleotide"
  source 1..25: mol_type = other RNA
cttccagagtaaatgtgtcaaatac

SEQ ID NO: 2171 - RNA, 25 nt, synthetic construct
  misc_feature 1..25: note = source = /note="Description of Artificial Sequence: Synthetic oligonucleotide"
  source 1..25: mol_type = other RNA
ctgatgagtatgctctaaaagaata

SEQ ID NO: 2172 - RNA, 25 nt, synthetic construct
  misc_feature 1..25: note = source = /note="Description of Artificial Sequence: Synthetic oligonucleotide"
  source 1..25: mol_type = other RNA
aaaagaatatggcgtcatgcgtgtt

SEQ ID NO: 2173 - RNA, 25 nt, synthetic construct
  misc_feature 1..25: note = source = /note="Description of Artificial Sequence: Synthetic oligonucleotide"
  source 1..25: mol_type = other RNA
acgctaagagaacttaaactttcaa

SEQ ID NO: 2174 - RNA, 25 nt, synthetic construct
  misc_feature 1..25: note = source = /note="Description of Artificial Sequence: Synthetic oligonucleotide"
  source 1..25: mol_type = other RNA
taagagaacttaaactttcaaaggt

SEQ ID NO: 2175 - RNA, 25 nt, synthetic construct
  misc_feature 1..25: note = source = /note="Description of Artificial Sequence: Synthetic oligonucleotide"
  source 1..25: mol_type = other RNA
aggccagtatttgacacatttactc

SEQ ID NO: 2176 - RNA, 25 nt, synthetic construct
  misc_feature 1..25: note = source = /note="Description of Artificial Sequence: Synthetic oligonucleotide"
  source 1..25: mol_type = other RNA
catattcttttagagcatactcatc

SEQ ID NO: 2177 - RNA, 25 nt, synthetic construct
  misc_feature 1..25: note = source = /note="Description of Artificial Sequence: Synthetic oligonucleotide"
  source 1..25: mol_type = other RNA
agttctcttagcgtatagtcatgag

SEQ ID NO: 2178 - RNA, 25 nt, synthetic construct
  misc_feature 1..25: note = source = /note="Description of Artificial Sequence: Synthetic oligonucleotide"
  source 1..25: mol_type = other RNA
ttcttggctctactccaggggaata

SEQ ID NO: 2179 - RNA, 25 nt, synthetic construct
  misc_feature 1..25: note = source = /note="Description of Artificial Sequence: Synthetic oligonucleotide"
  source 1..25: mol_type = other RNA
ctactccaggggaatacggagagaa

SEQ ID NO: 2180 - RNA, 25 nt, synthetic construct
  misc_feature 1..25: note = source = /note="Description of Artificial Sequence: Synthetic oligonucleotide"
  source 1..25: mol_type = other RNA
ccaggggaatacggagagaacggtc

SEQ ID NO: 2181 - RNA, 25 nt, synthetic construct
  misc_feature 1..25: note = source = /note="Description of Artificial Sequence: Synthetic oligonucleotide"
  source 1..25: mol_type = other RNA
gagaacggtctggcaataccacttt

SEQ ID NO: 2182 - RNA, 25 nt, synthetic construct
  misc_feature 1..25: note = source = /note="Description of Artificial Sequence: Synthetic oligonucleotide"
  source 1..25: mol_type = other RNA
ggtctggcaataccactttcggacc

SEQ ID NO: 2183 - RNA, 25 nt, synthetic construct
  misc_feature 1..25: note = source = /note="Description of Artificial Sequence: Synthetic oligonucleotide"
  source 1..25: mol_type = other RNA
tggcaataccactttcggacctggc

SEQ ID NO: 2184 - RNA, 25 nt, synthetic construct
  misc_feature 1..25: note = source = /note="Description of Artificial Sequence: Synthetic oligonucleotide"
  source 1..25: mol_type = other RNA
accactttcggacctggccggacca

SEQ ID NO: 2185 - RNA, 25 nt, synthetic construct
  misc_feature 1..25: note = source = /note="Description of Artificial Sequence: Synthetic oligonucleotide"
  source 1..25: mol_type = other RNA
cggaccacggcgtgcccagcgaccc

SEQ ID NO: 2186 - RNA, 25 nt, synthetic construct
  misc_feature 1..25: note = source = /note="Description of Artificial Sequence: Synthetic oligonucleotide"
  source 1..25: mol_type = other RNA
ggaccacggcgtgcccagcgaccct

SEQ ID NO: 2187 - RNA, 25 nt, synthetic construct
  misc_feature 1..25: note = source = /note="Description of Artificial Sequence: Synthetic oligonucleotide"
  source 1..25: mol_type = other RNA
gaccacggcgtgcccagcgaccctg

SEQ ID NO: 2188 - RNA, 25 nt, synthetic construct
  misc_feature 1..25: note = source = /note="Description of Artificial Sequence: Synthetic oligonucleotide"
  source 1..25: mol_type = other RNA
accacggcgtgcccagcgaccctgg

SEQ ID NO: 2189 - RNA, 25 nt, synthetic construct
  misc_feature 1..25: note = source = /note="Description of Artificial Sequence: Synthetic oligonucleotide"
  source 1..25: mol_type = other RNA
gtgcccagcgaccctgggggcgtgc

SEQ ID NO: 2190 - RNA, 25 nt, synthetic construct
  misc_feature 1..25: note = source = /note="Description of Artificial Sequence: Synthetic oligonucleotide"
  source 1..25: mol_type = other RNA
gaccctgggggcgtgctggacttcc

SEQ ID NO: 2191 - RNA, 25 nt, synthetic construct
  misc_feature 1..25: note = source = /note="Description of Artificial Sequence: Synthetic oligonucleotide"
  source 1..25: mol_type = other RNA
cctgggggcgtgctggacttcctgg

SEQ ID NO: 2192 - RNA, 25 nt, synthetic construct
  misc_feature 1..25: note = source = /note="Description of Artificial Sequence: Synthetic oligonucleotide"
  source 1..25: mol_type = other RNA
gggggcgtgctggacttcctggagg

SEQ ID NO: 2193 - RNA, 25 nt, synthetic construct
  misc_feature 1..25: note = source = /note="Description of Artificial Sequence: Synthetic oligonucleotide"
  source 1..25: mol_type = other RNA
ttcctggaggaggtgcaccataagc

SEQ ID NO: 2194 - RNA, 25 nt, synthetic construct
  misc_feature 1..25: note = source = /note="Description of Artificial Sequence: Synthetic oligonucleotide"
  source 1..25: mol_type = other RNA
gtgcaccataagcaggagagcatca

SEQ ID NO: 2195 - RNA, 25 nt, synthetic construct
  misc_feature 1..25: note = source = /note="Description of Artificial Sequence: Synthetic oligonucleotide"
  source 1..25: mol_type = other RNA
ataagcaggagagcatcatggatgc

SEQ ID NO: 2196 - RNA, 25 nt, synthetic construct
  misc_feature 1..25: note = source = /note="Description of Artificial Sequence: Synthetic oligonucleotide"
  source 1..25: mol_type = other RNA
taagcaggagagcatcatggatgca

SEQ ID NO: 2197 - RNA, 25 nt, synthetic construct
  misc_feature 1..25: note = source = /note="Description of Artificial Sequence: Synthetic oligonucleotide"
  source 1..25: mol_type = other RNA
caggagagcatcatggatgcagggc

SEQ ID NO: 2198 - RNA, 25 nt, synthetic construct
  misc_feature 1..25: note = source = /note="Description of Artificial Sequence: Synthetic oligonucleotide"
  source 1..25: mol_type = other RNA
agcatcatggatgcagggccggtcg

SEQ ID NO: 2199 - RNA, 25 nt, synthetic construct
  misc_feature 1..25: note = source = /note="Description of Artificial Sequence: Synthetic oligonucleotide"
  source 1..25: mol_type = other RNA
tgcagggccggtcgtggtgcactgc

SEQ ID NO: 2200 - RNA, 25 nt, synthetic construct
  misc_feature 1..25: note = source = /note="Description of Artificial Sequence: Synthetic oligonucleotide"
  source 1..25: mol_type = other RNA
aggtgacagctcctgctgcccctct

SEQ ID NO: 2201 - RNA, 25 nt, synthetic construct
  misc_feature 1..25: note = source = /note="Description of Artificial Sequence: Synthetic oligonucleotide"
  source 1..25: mol_type = other RNA
agcctgtccctgtctcctagcgccc

SEQ ID NO: 2202 - RNA, 25 nt, synthetic construct
  misc_feature 1..25: note = source = /note="Description of Artificial Sequence: Synthetic oligonucleotide"
  source 1..25: mol_type = other RNA
gcctgtccctgtctcctagcgccca

SEQ ID NO: 2203 - RNA, 25 nt, synthetic construct
  misc_feature 1..25: note = source = /note="Description of Artificial Sequence: Synthetic oligonucleotide"
  source 1..25: mol_type = other RNA
tacccactcctagctctttaactgt

SEQ ID NO: 2204 - RNA, 25 nt, synthetic construct
  misc_feature 1..25: note = source = /note="Description of Artificial Sequence: Synthetic oligonucleotide"
  source 1..25: mol_type = other RNA
gtaggaagaatttaatatctgtttg

SEQ ID NO: 2205 - RNA, 25 nt, synthetic construct
  misc_feature 1..25: note = source = /note="Description of Artificial Sequence: Synthetic oligonucleotide"
  source 1..25: mol_type = other RNA
tttgaggcatagagcaactgcattg

SEQ ID NO: 2206 - RNA, 25 nt, synthetic construct
  misc_feature 1..25: note = source = /note="Description of Artificial Sequence: Synthetic oligonucleotide"
  source 1..25: mol_type = other RNA
ttgaggcatagagcaactgcattga

SEQ ID NO: 2207 - RNA, 25 nt, synthetic construct
  misc_feature 1..25: note = source = /note="Description of Artificial Sequence: Synthetic oligonucleotide"
  source 1..25: mol_type = other RNA
tgcattgagggacattttgatccca

SEQ ID NO: 2208 - RNA, 25 nt, synthetic construct
  misc_feature 1..25: note = source = /note="Description of Artificial Sequence: Synthetic oligonucleotide"
  source 1..25: mol_type = other RNA
ctcctagaccctacagcactgccat

SEQ ID NO: 2209 - RNA, 25 nt, synthetic construct
  misc_feature 1..25: note = source = /note="Description of Artificial Sequence: Synthetic oligonucleotide"
  source 1..25: mol_type = other RNA
gaccctacagcactgccattggcca

SEQ ID NO: 2210 - RNA, 25 nt, synthetic construct
  misc_feature 1..25: note = source = /note="Description of Artificial Sequence: Synthetic oligonucleotide"
  source 1..25: mol_type = other RNA
acagcactgccattggccatggcca

SEQ ID NO: 2211 - RNA, 25 nt, synthetic construct
  misc_feature 1..25: note = source = /note="Description of Artificial Sequence: Synthetic oligonucleotide"
  source 1..25: mol_type = other RNA
agttgtgcattaaacaacttcatcc

SEQ ID NO: 2212 - RNA, 25 nt, synthetic construct
  misc_feature 1..25: note = source = /note="Description of Artificial Sequence: Synthetic oligonucleotide"
  source 1..25: mol_type = other RNA
ccagaccgttctctccgtattcccc

SEQ ID NO: 2213 - RNA, 25 nt, synthetic construct
  misc_feature 1..25: note = source = /note="Description of Artificial Sequence: Synthetic oligonucleotide"
  source 1..25: mol_type = other RNA
gccgtggtccggccaggtccgaaag

SEQ ID NO: 2214 - RNA, 25 nt, synthetic construct
  misc_feature 1..25: note = source = /note="Description of Artificial Sequence: Synthetic oligonucleotide"
  source 1..25: mol_type = other RNA
tcgctgggcacgccgtggtccggcc

SEQ ID NO: 2215 - RNA, 25 nt, synthetic construct
  misc_feature 1..25: note = source = /note="Description of Artificial Sequence: Synthetic oligonucleotide"
  source 1..25: mol_type = other RNA
cagggtcgctgggcacgccgtggtc

SEQ ID NO: 2216 - RNA, 25 nt, synthetic construct
  misc_feature 1..25: note = source = /note="Description of Artificial Sequence: Synthetic oligonucleotide"
  source 1..25: mol_type = other RNA
gcccccagggtcgctgggcacgccg

SEQ ID NO: 2217 - RNA, 25 nt, synthetic construct
  misc_feature 1..25: note = source = /note="Description of Artificial Sequence: Synthetic oligonucleotide"
  source 1..25: mol_type = other RNA
agtccagcacgcccccagggtcgct

SEQ ID NO: 2218 - RNA, 25 nt, synthetic construct
  misc_feature 1..25: note = source = /note="Description of Artificial Sequence: Synthetic oligonucleotide"
  source 1..25: mol_type = other RNA
aagtccagcacgcccccagggtcgc

SEQ ID NO: 2219 - RNA, 25 nt, synthetic construct
  misc_feature 1..25: note = source = /note="Description of Artificial Sequence: Synthetic oligonucleotide"
  source 1..25: mol_type = other RNA
ctccaggaagtccagcacgccccca

SEQ ID NO: 2220 - RNA, 25 nt, synthetic construct
  misc_feature 1..25: note = source = /note="Description of Artificial Sequence: Synthetic oligonucleotide"
  source 1..25: mol_type = other RNA
cctccaggaagtccagcacgccccc

SEQ ID NO: 2221 - RNA, 25 nt, synthetic construct
  misc_feature 1..25: note = source = /note="Description of Artificial Sequence: Synthetic oligonucleotide"
  source 1..25: mol_type = other RNA
ctcctgcttatggtgcacctcctcc

SEQ ID NO: 2222 - RNA, 25 nt, synthetic construct
  misc_feature 1..25: note = source = /note="Description of Artificial Sequence: Synthetic oligonucleotide"
  source 1..25: mol_type = other RNA
tgcatccatgatgctctcctgctta

SEQ ID NO: 2223 - RNA, 25 nt, synthetic construct
  misc_feature 1..25: note = source = /note="Description of Artificial Sequence: Synthetic oligonucleotide"
  source 1..25: mol_type = other RNA
gctgtcacctgcagtgcaccacgac

SEQ ID NO: 2224 - RNA, 25 nt, synthetic construct
  misc_feature 1..25: note = source = /note="Description of Artificial Sequence: Synthetic oligonucleotide"
  source 1..25: mol_type = other RNA
acaggctgtggcctagaggggcagc

SEQ ID NO: 2225 - RNA, 25 nt, synthetic construct
  misc_feature 1..25: note = source = /note="Description of Artificial Sequence: Synthetic oligonucleotide"
  source 1..25: mol_type = other RNA
gacagggacaggctgtggcctagag

SEQ ID NO: 2226 - RNA, 25 nt, synthetic construct
  misc_feature 1..25: note = source = /note="Description of Artificial Sequence: Synthetic oligonucleotide"
  source 1..25: mol_type = other RNA
agacagggacaggctgtggcctaga

SEQ ID NO: 2227 - RNA, 25 nt, synthetic construct
  misc_feature 1..25: note = source = /note="Description of Artificial Sequence: Synthetic oligonucleotide"
  source 1..25: mol_type = other RNA
gagacagggacaggctgtggcctag

SEQ ID NO: 2228 - RNA, 25 nt, synthetic construct
  misc_feature 1..25: note = source = /note="Description of Artificial Sequence: Synthetic oligonucleotide"
  source 1..25: mol_type = other RNA
ggcgctaggagacagggacaggctg

SEQ ID NO: 2229 - RNA, 25 nt, synthetic construct
  misc_feature 1..25: note = source = /note="Description of Artificial Sequence: Synthetic oligonucleotide"
  source 1..25: mol_type = other RNA
gccctgggcgctaggagacagggac

SEQ ID NO: 2230 - RNA, 25 nt, synthetic construct
  misc_feature 1..25: note = source = /note="Description of Artificial Sequence: Synthetic oligonucleotide"
  source 1..25: mol_type = other RNA
agcaagccctgggcgctaggagaca

SEQ ID NO: 2231 - RNA, 25 nt, synthetic construct
  misc_feature 1..25: note = source = /note="Description of Artificial Sequence: Synthetic oligonucleotide"
  source 1..25: mol_type = other RNA
aagcaagccctgggcgctaggagac

SEQ ID NO: 2232 - RNA, 25 nt, synthetic construct
  misc_feature 1..25: note = source = /note="Description of Artificial Sequence: Synthetic oligonucleotide"
  source 1..25: mol_type = other RNA
taggtaaaagcaagccctgggcgct

SEQ ID NO: 2233 - RNA, 25 nt, synthetic construct
  misc_feature 1..25: note = source = /note="Description of Artificial Sequence: Synthetic oligonucleotide"
  source 1..25: mol_type = other RNA
gagtgggtaggtaaaagcaagccct

SEQ ID NO: 2234 - RNA, 25 nt, synthetic construct
  misc_feature 1..25: note = source = /note="Description of Artificial Sequence: Synthetic oligonucleotide"
  source 1..25: mol_type = other RNA
ggagtgggtaggtaaaagcaagccc

SEQ ID NO: 2235 - RNA, 25 nt, synthetic construct
  misc_feature 1..25: note = source = /note="Description of Artificial Sequence: Synthetic oligonucleotide"
  source 1..25: mol_type = other RNA
tacagttaaagagctaggagtgggt

SEQ ID NO: 2236 - RNA, 25 nt, synthetic construct
  misc_feature 1..25: note = source = /note="Description of Artificial Sequence: Synthetic oligonucleotide"
  source 1..25: mol_type = other RNA
ttcctacagttaaagagctaggagt

SEQ ID NO: 2237 - RNA, 25 nt, synthetic construct
  misc_feature 1..25: note = source = /note="Description of Artificial Sequence: Synthetic oligonucleotide"
  source 1..25: mol_type = other RNA
cttcctacagttaaagagctaggag

SEQ ID NO: 2238 - RNA, 25 nt, synthetic construct
  misc_feature 1..25: note = source = /note="Description of Artificial Sequence: Synthetic oligonucleotide"
  source 1..25: mol_type = other RNA
aaattcttcctacagttaaagagct

SEQ ID NO: 2239 - RNA, 25 nt, synthetic construct
  misc_feature 1..25: note = source = /note="Description of Artificial Sequence: Synthetic oligonucleotide"
  source 1..25: mol_type = other RNA
gtagggtctaggagaaatatgcctt

SEQ ID NO: 2240 - RNA, 25 nt, synthetic construct
  misc_feature 1..25: note = source = /note="Description of Artificial Sequence: Synthetic oligonucleotide"
  source 1..25: mol_type = other RNA
tgtagggtctaggagaaatatgcct

SEQ ID NO: 2241 - RNA, 25 nt, synthetic construct
  misc_feature 1..25: note = source = /note="Description of Artificial Sequence: Synthetic oligonucleotide"
  source 1..25: mol_type = other RNA
ggccaatggcagtgctgtagggtct

SEQ ID NO: 2242 - RNA, 25 nt, synthetic construct
  misc_feature 1..25: note = source = /note="Description of Artificial Sequence: Synthetic oligonucleotide"
  source 1..25: mol_type = other RNA
ggccatggccaatggcagtgctgta

SEQ ID NO: 2243 - RNA, 25 nt, synthetic construct
  misc_feature 1..25: note = source = /note="Description of Artificial Sequence: Synthetic oligonucleotide"
  source 1..25: mol_type = other RNA
tggccatggccaatggcagtgctgt

SEQ ID NO: 2244 - RNA, 25 nt, synthetic construct
  misc_feature 1..25: note = source = /note="Description of Artificial Sequence: Synthetic oligonucleotide"
  source 1..25: mol_type = other RNA
agcatgttgccatggccatggccaa

SEQ ID NO: 2245 - RNA, 25 nt, synthetic construct
  misc_feature 1..25: note = source = /note="Description of Artificial Sequence: Synthetic oligonucleotide"
  source 1..25: mol_type = other RNA
ttaactgagcatgttgccatggcca

SEQ ID NO: 2246 - RNA, 25 nt, synthetic construct
  misc_feature 1..25: note = source = /note="Description of Artificial Sequence: Synthetic oligonucleotide"
  source 1..25: mol_type = other RNA
gctgttttaactgagcatgttgcca

SEQ ID NO: 2247 - RNA, 25 nt, synthetic construct
  misc_feature 1..25: note = source = /note="Description of Artificial Sequence: Synthetic oligonucleotide"
  source 1..25: mol_type = other RNA
aagttgtttaatgcacaacttctgg

SEQ ID NO: 2248 - RNA, 25 nt, synthetic construct
  misc_feature 1..25: note = source = /note="Description of Artificial Sequence: Synthetic oligonucleotide"
  source 1..25: mol_type = other RNA
atgaagttgtttaatgcacaacttc

SEQ ID NO: 2249 - RNA, 25 nt, synthetic construct
  misc_feature 1..25: note = source = /note="Description of Artificial Sequence: Synthetic oligonucleotide"
  source 1..25: mol_type = other RNA
gtccttctgcccgcagtgctggaat

SEQ ID NO: 2250 - RNA, 25 nt, synthetic construct
  misc_feature 1..25: note = source = /note="Description of Artificial Sequence: Synthetic oligonucleotide"
  source 1..25: mol_type = other RNA
ttctgcccgcagtgctggaattggc

SEQ ID NO: 2251 - RNA, 25 nt, synthetic construct
  misc_feature 1..25: note = source = /note="Description of Artificial Sequence: Synthetic oligonucleotide"
  source 1..25: mol_type = other RNA
cccgcagtgctggaattggccggac

SEQ ID NO: 2252 - RNA, 25 nt, synthetic construct
  misc_feature 1..25: note = source = /note="Description of Artificial Sequence: Synthetic oligonucleotide"
  source 1..25: mol_type = other RNA
ccgcagtgctggaattggccggaca

SEQ ID NO: 2253 - RNA, 25 nt, synthetic construct
  misc_feature 1..25: note = source = /note="Description of Artificial Sequence: Synthetic oligonucleotide"
  source 1..25: mol_type = other RNA
ttcttattgacatcatcagagagaa

SEQ ID NO: 2254 - RNA, 25 nt, synthetic construct
  misc_feature 1..25: note = source = /note="Description of Artificial Sequence: Synthetic oligonucleotide"
  source 1..25: mol_type = other RNA
ttattgacatcatcagagagaaagg

SEQ ID NO: 2255 - RNA, 25 nt, synthetic construct
  misc_feature 1..25: note = source = /note="Description of Artificial Sequence: Synthetic oligonucleotide"
  source 1..25: mol_type = other RNA
tattgacatcatcagagagaaaggt

SEQ ID NO: 2256 - RNA, 25 nt, synthetic construct
  misc_feature 1..25: note = source = /note="Description of Artificial Sequence: Synthetic oligonucleotide"
  source 1..25: mol_type = other RNA
tcatcagagagaaaggtgggtcatc

SEQ ID NO: 2257 - RNA, 25 nt, synthetic construct
  misc_feature 1..25: note = source = /note="Description of Artificial Sequence: Synthetic oligonucleotide"
  source 1..25: mol_type = other RNA
tcagagagaaaggtgggtcatctgg

SEQ ID NO: 2258 - RNA, 25 nt, synthetic construct
  misc_feature 1..25: note = source = /note="Description of Artificial Sequence: Synthetic oligonucleotide"
  source 1..25: mol_type = other RNA
cagagagaaaggtgggtcatctggt

SEQ ID NO: 2259 - RNA, 25 nt, synthetic construct
  misc_feature 1..25: note = source = /note="Description of Artificial Sequence: Synthetic oligonucleotide"
  source 1..25: mol_type = other RNA
ggccaattccagcactgcgggcaga

SEQ ID NO: 2260 - RNA, 25 nt, synthetic construct
  misc_feature 1..25: note = source = /note="Description of Artificial Sequence: Synthetic oligonucleotide"
  source 1..25: mol_type = other RNA
cctgtccggccaattccagcactgc

SEQ ID NO: 2261 - RNA, 25 nt, synthetic construct
  misc_feature 1..25: note = source = /note="Description of Artificial Sequence: Synthetic oligonucleotide"
  source 1..25: mol_type = other RNA
ccctgtccggccaattccagcactg

SEQ ID NO: 2262 - RNA, 25 nt, synthetic construct
  misc_feature 1..25: note = source = /note="Description of Artificial Sequence: Synthetic oligonucleotide"
  source 1..25: mol_type = other RNA
atcaatcacaatgaacgtccctgtc

SEQ ID NO: 2263 - RNA, 25 nt, synthetic construct
  misc_feature 1..25: note = source = /note="Description of Artificial Sequence: Synthetic oligonucleotide"
  source 1..25: mol_type = other RNA
attgacgttcccaaaaccatccaga

SEQ ID NO: 2264 - RNA, 25 nt, synthetic construct
  misc_feature 1..25: note = source = /note="Description of Artificial Sequence: Synthetic oligonucleotide"
  source 1..25: mol_type = other RNA
cgttcccaaaaccatccagatggtg

SEQ ID NO: 2265 - RNA, 25 nt, synthetic construct
  misc_feature 1..25: note = source = /note="Description of Artificial Sequence: Synthetic oligonucleotide"
  source 1..25: mol_type = other RNA
aaccatccagatggtgcggtctcag

SEQ ID NO: 2266 - RNA, 25 nt, synthetic construct
  misc_feature 1..25: note = source = /note="Description of Artificial Sequence: Synthetic oligonucleotide"
  source 1..25: mol_type = other RNA
tccagatggtgcggtctcagaggtc

SEQ ID NO: 2267 - RNA, 25 nt, synthetic construct
  misc_feature 1..25: note = source = /note="Description of Artificial Sequence: Synthetic oligonucleotide"
  source 1..25: mol_type = other RNA
ccagatggtgcggtctcagaggtca

SEQ ID NO: 2268 - RNA, 25 nt, synthetic construct
  misc_feature 1..25: note = source = /note="Description of Artificial Sequence: Synthetic oligonucleotide"
  source 1..25: mol_type = other RNA
atggtgcggtctcagaggtcaggga

SEQ ID NO: 2269 - RNA, 25 nt, synthetic construct
  misc_feature 1..25: note = source = /note="Description of Artificial Sequence: Synthetic oligonucleotide"
  source 1..25: mol_type = other RNA
gaagcacagtaccgatttatctata

SEQ ID NO: 2270 - RNA, 25 nt, synthetic construct
  misc_feature 1..25: note = source = /note="Description of Artificial Sequence: Synthetic oligonucleotide"
  source 1..25: mol_type = other RNA
gcacagtaccgatttatctatatgg

SEQ ID NO: 2271 - RNA, 25 nt, synthetic construct
  misc_feature 1..25: note = source = /note="Description of Artificial Sequence: Synthetic oligonucleotide"
  source 1..25: mol_type = other RNA
gcattatattgaaacactacagcgc

SEQ ID NO: 2272 - RNA, 25 nt, synthetic construct
  misc_feature 1..25: note = source = /note="Description of Artificial Sequence: Synthetic oligonucleotide"
  source 1..25: mol_type = other RNA
ctacagcgcaggattgaagaagagc

SEQ ID NO: 2273 - RNA, 25 nt, synthetic construct
  misc_feature 1..25: note = source = /note="Description of Artificial Sequence: Synthetic oligonucleotide"
  source 1..25: mol_type = other RNA
ttgaagaagagcaggtaccagcctg

SEQ ID NO: 2274 - RNA, 25 nt, synthetic construct
  misc_feature 1..25: note = source = /note="Description of Artificial Sequence: Synthetic oligonucleotide"
  source 1..25: mol_type = other RNA
tgaagaagagcaggtaccagcctga

SEQ ID NO: 2275 - RNA, 25 nt, synthetic construct
  misc_feature 1..25: note = source = /note="Description of Artificial Sequence: Synthetic oligonucleotide"
  source 1..25: mol_type = other RNA
gaagagcaggtaccagcctgagggc

SEQ ID NO: 2276 - RNA, 25 nt, synthetic construct
  misc_feature 1..25: note = source = /note="Description of Artificial Sequence: Synthetic oligonucleotide"
  source 1..25: mol_type = other RNA
tcaatatcgcagtcaacacctacga

SEQ ID NO: 2277 - RNA, 25 nt, synthetic construct
  misc_feature 1..25: note = source = /note="Description of Artificial Sequence: Synthetic oligonucleotide"
  source 1..25: mol_type = other RNA
gagaccgcaccatctggatggtttt

SEQ ID NO: 2278 - RNA, 25 nt, synthetic construct
  misc_feature 1..25: note = source = /note="Description of Artificial Sequence: Synthetic oligonucleotide"
  source 1..25: mol_type = other RNA
tgagaccgcaccatctggatggttt

SEQ ID NO: 2279 - RNA, 25 nt, synthetic construct
  misc_feature 1..25: note = source = /note="Description of Artificial Sequence: Synthetic oligonucleotide"
  source 1..25: mol_type = other RNA
gacctctgagaccgcaccatctgga

SEQ ID NO: 2280 - RNA, 25 nt, synthetic construct
  misc_feature 1..25: note = source = /note="Description of Artificial Sequence: Synthetic oligonucleotide"
  source 1..25: mol_type = other RNA
ccctgacctctgagaccgcaccatc

SEQ ID NO: 2281 - RNA, 25 nt, synthetic construct
  misc_feature 1..25: note = source = /note="Description of Artificial Sequence: Synthetic oligonucleotide"
  source 1..25: mol_type = other RNA
gataaatcggtactgtgcttctgtc

SEQ ID NO: 2282 - RNA, 25 nt, synthetic construct
  misc_feature 1..25: note = source = /note="Description of Artificial Sequence: Synthetic oligonucleotide"
  source 1..25: mol_type = other RNA
atgctggaccgccatatagataaat

SEQ ID NO: 2283 - RNA, 25 nt, synthetic construct
  misc_feature 1..25: note = source = /note="Description of Artificial Sequence: Synthetic oligonucleotide"
  source 1..25: mol_type = other RNA
gcgctgtagtgtttcaatataatgc

SEQ ID NO: 2284 - RNA, 25 nt, synthetic construct
  misc_feature 1..25: note = source = /note="Description of Artificial Sequence: Synthetic oligonucleotide"
  source 1..25: mol_type = other RNA
ctcttccaaatttcagaaaagcaag

SEQ ID NO: 2285 - RNA, 25 nt, synthetic construct
  misc_feature 1..25: note = source = /note="Description of Artificial Sequence: Synthetic oligonucleotide"
  source 1..25: mol_type = other RNA
ccaaatttcagaaaagcaagaggaa

SEQ ID NO: 2286 - RNA, 25 nt, synthetic construct
  misc_feature 1..25: note = source = /note="Description of Artificial Sequence: Synthetic oligonucleotide"
  source 1..25: mol_type = other RNA
caaatttcagaaaagcaagaggaaa

SEQ ID NO: 2287 - RNA, 25 nt, synthetic construct
  misc_feature 1..25: note = source = /note="Description of Artificial Sequence: Synthetic oligonucleotide"
  source 1..25: mol_type = other RNA
tatacaaatattaagtattctctag

SEQ ID NO: 2288 - RNA, 25 nt, synthetic construct
  misc_feature 1..25: note = source = /note="Description of Artificial Sequence: Synthetic oligonucleotide"
  source 1..25: mol_type = other RNA
agtattctctagcggaccagacgag

SEQ ID NO: 2289 - RNA, 25 nt, synthetic construct
  misc_feature 1..25: note = source = /note="Description of Artificial Sequence: Synthetic oligonucleotide"
  source 1..25: mol_type = other RNA
ccctgtgcagagtaagtagtgctga

SEQ ID NO: 2290 - RNA, 25 nt, synthetic construct
  misc_feature 1..25: note = source = /note="Description of Artificial Sequence: Synthetic oligonucleotide"
  source 1..25: mol_type = other RNA
cctttcctcttgcttttctgaaatt

SEQ ID NO: 2291 - RNA, 25 nt, synthetic construct
  misc_feature 1..25: note = source = /note="Description of Artificial Sequence: Synthetic oligonucleotide"
  source 1..25: mol_type = other RNA
gagagggctctgatctccactcgtc

SEQ ID NO: 2292 - RNA, 25 nt, synthetic construct
  misc_feature 1..25: note = source = /note="Description of Artificial Sequence: Synthetic oligonucleotide"
  source 1..25: mol_type = other RNA
tggcgttggagtacaaggcgggaga

SEQ ID NO: 2293 - RNA, 25 nt, synthetic construct
  misc_feature 1..25: note = source = /note="Description of Artificial Sequence: Synthetic oligonucleotide"
  source 1..25: mol_type = other RNA
gtggcgttggagtacaaggcgggag

SEQ ID NO: 2294 - RNA, 25 nt, synthetic construct
  misc_feature 1..25: note = source = /note="Description of Artificial Sequence: Synthetic oligonucleotide"
  source 1..25: mol_type = other RNA
acagggtggcgttggagtacaaggc

SEQ ID NO: 2295 - RNA, 25 nt, synthetic construct
  misc_feature 1..25: note = source = /note="Description of Artificial Sequence: Synthetic oligonucleotide"
  source 1..25: mol_type = other RNA
cacagggtggcgttggagtacaagg

SEQ ID NO: 2296 - RNA, 25 nt, synthetic construct
  misc_feature 1..25: note = source = /note="Description of Artificial Sequence: Synthetic oligonucleotide"
  source 1..25: mol_type = other RNA
ctgcacagggtggcgttggagtaca

SEQ ID NO: 2297 - RNA, 25 nt, synthetic construct
  misc_feature 1..25: note = source = /note="Description of Artificial Sequence: Synthetic oligonucleotide"
  source 1..25: mol_type = other RNA
ctacttactctgcacagggtggcgt

SEQ ID NO: 2298 - RNA, 25 nt, synthetic construct
  misc_feature 1..25: note = source = /note="Description of Artificial Sequence: Synthetic oligonucleotide"
  source 1..25: mol_type = other RNA
tcagcactacttactctgcacaggg

SEQ ID NO: 2299 - RNA, 25 nt, synthetic construct
  misc_feature 1..25: note = source = /note="Description of Artificial Sequence: Synthetic oligonucleotide"
  source 1..25: mol_type = other RNA
ccttcagcactacttactctgcaca

SEQ ID NO: 2300 - RNA, 25 nt, synthetic construct
  misc_feature 1..25: note = source = /note="Description of Artificial Sequence: Synthetic oligonucleotide"
  source 1..25: mol_type = other RNA
tccttcagcactacttactctgcac

SEQ ID NO: 2301 - RNA, 25 nt, synthetic construct
  misc_feature 1..25: note = source = /note="Description of Artificial Sequence: Synthetic oligonucleotide"
  source 1..25: mol_type = other RNA
gacagtgctagagtctatgaaaacg

SEQ ID NO: 2302 - RNA, 25 nt, synthetic construct
  misc_feature 1..25: note = source = /note="Description of Artificial Sequence: Synthetic oligonucleotide"
  source 1..25: mol_type = other RNA
acagtgctagagtctatgaaaacgt

SEQ ID NO: 2303 - RNA, 25 nt, synthetic construct
  misc_feature 1..25: note = source = /note="Description of Artificial Sequence: Synthetic oligonucleotide"
  source 1..25: mol_type = other RNA
cctgccaaaacttcagcacagaaat

SEQ ID NO: 2304 - RNA, 25 nt, synthetic construct
  misc_feature 1..25: note = source = /note="Description of Artificial Sequence: Synthetic oligonucleotide"
  source 1..25: mol_type = other RNA
actctagcactgtcttctctcattc

SEQ ID NO: 2305 - RNA, 25 nt, synthetic construct
  misc_feature 1..25: note = source = /note="Description of Artificial Sequence: Synthetic oligonucleotide"
  source 1..25: mol_type = other RNA
tctgaaacttttctgctgttgcatc

SEQ ID NO: 2306 - RNA, 25 nt, synthetic construct
  misc_feature 1..25: note = source = /note="Description of Artificial Sequence: Synthetic oligonucleotide"
  source 1..25: mol_type = other RNA
cctatttctgtgctgaagttttggc

SEQ ID NO: 2307 - RNA, 25 nt, synthetic construct
  misc_feature 1..25: note = source = /note="Description of Artificial Sequence: Synthetic oligonucleotide"
  source 1..25: mol_type = other RNA
aatacctatttctgtgctgaagttt

SEQ ID NO: 2308 - RNA, 25 nt, synthetic construct
  misc_feature 1..25: note = source = /note="Description of Artificial Sequence: Synthetic oligonucleotide"
  source 1..25: mol_type = other RNA
agaaagtttatgtgaagacagaatt

SEQ ID NO: 2309 - RNA, 25 nt, synthetic construct
  misc_feature 1..25: note = source = /note="Description of Artificial Sequence: Synthetic oligonucleotide"
  source 1..25: mol_type = other RNA
tttatgtgaagacagaatttggatt

SEQ ID NO: 2310 - RNA, 25 nt, synthetic construct
  misc_feature 1..25: note = source = /note="Description of Artificial Sequence: Synthetic oligonucleotide"
  source 1..25: mol_type = other RNA
tgtgaagacagaatttggatttgga

SEQ ID NO: 2311 - RNA, 25 nt, synthetic construct
  misc_feature 1..25: note = source = /note="Description of Artificial Sequence: Synthetic oligonucleotide"
  source 1..25: mol_type = other RNA
atttggatttggaaggcttgcaatg

SEQ ID NO: 2312 - RNA, 25 nt, synthetic construct
  misc_feature 1..25: note = source = /note="Description of Artificial Sequence: Synthetic oligonucleotide"
  source 1..25: mol_type = other RNA
attttatagaatttgtttgaaattg

SEQ ID NO: 2313 - RNA, 25 nt, synthetic construct
  misc_feature 1..25: note = source = /note="Description of Artificial Sequence: Synthetic oligonucleotide"
  source 1..25: mol_type = other RNA
attgtgcgctgtattttgcagatta

SEQ ID NO: 2314 - RNA, 25 nt, synthetic construct
  misc_feature 1..25: note = source = /note="Description of Artificial Sequence: Synthetic oligonucleotide"
  source 1..25: mol_type = other RNA
ttgtgcgctgtattttgcagattat

SEQ ID NO: 2315 - RNA, 25 nt, synthetic construct
  misc_feature 1..25: note = source = /note="Description of Artificial Sequence: Synthetic oligonucleotide"
  source 1..25: mol_type = other RNA
tgtgcgctgtattttgcagattatg

SEQ ID NO: 2316 - RNA, 25 nt, synthetic construct
  misc_feature 1..25: note = source = /note="Description of Artificial Sequence: Synthetic oligonucleotide"
  source 1..25: mol_type = other RNA
ttatggggattcaaattctagtaat

SEQ ID NO: 2317 - RNA, 25 nt, synthetic construct
  misc_feature 1..25: note = source = /note="Description of Artificial Sequence: Synthetic oligonucleotide"
  source 1..25: mol_type = other RNA
gtttaattttttttttcctcattgt

SEQ ID NO: 2318 - RNA, 25 nt, synthetic construct
  misc_feature 1..25: note = source = /note="Description of Artificial Sequence: Synthetic oligonucleotide"
  source 1..25: mol_type = other RNA
tttaattttttttttcctcattgtt

SEQ ID NO: 2319 - RNA, 25 nt, synthetic construct
  misc_feature 1..25: note = source = /note="Description of Artificial Sequence: Synthetic oligonucleotide"
  source 1..25: mol_type = other RNA
ttaattttttttttcctcattgttg

SEQ ID NO: 2320 - RNA, 25 nt, synthetic construct
  misc_feature 1..25: note = source = /note="Description of Artificial Sequence: Synthetic oligonucleotide"
  source 1..25: mol_type = other RNA
ttggggatgatgagaagaaatgatt

SEQ ID NO: 2321 - RNA, 25 nt, synthetic construct
  misc_feature 1..25: note = source = /note="Description of Artificial Sequence: Synthetic oligonucleotide"
  source 1..25: mol_type = other RNA
tggggatgatgagaagaaatgattt

SEQ ID NO: 2322 - RNA, 25 nt, synthetic construct
  misc_feature 1..25: note = source = /note="Description of Artificial Sequence: Synthetic oligonucleotide"
  source 1..25: mol_type = other RNA
tcatttaccatcatgtatccagtag

SEQ ID NO: 2323 - RNA, 25 nt, synthetic construct
  misc_feature 1..25: note = source = /note="Description of Artificial Sequence: Synthetic oligonucleotide"
  source 1..25: mol_type = other RNA
tccagtagtggataattcattttga

SEQ ID NO: 2324 - RNA, 25 nt, synthetic construct
  misc_feature 1..25: note = source = /note="Description of Artificial Sequence: Synthetic oligonucleotide"
  source 1..25: mol_type = other RNA
aattcattttgatggcttctatttt

SEQ ID NO: 2325 - RNA, 25 nt, synthetic construct
  misc_feature 1..25: note = source = /note="Description of Artificial Sequence: Synthetic oligonucleotide"
  source 1..25: mol_type = other RNA
gactgtcagaagttgacctttgcac

SEQ ID NO: 2326 - RNA, 25 nt, synthetic construct
  misc_feature 1..25: note = source = /note="Description of Artificial Sequence: Synthetic oligonucleotide"
  source 1..25: mol_type = other RNA
ttaaagagtcatagaaaaagaatca

SEQ ID NO: 2327 - RNA, 25 nt, synthetic construct
  misc_feature 1..25: note = source = /note="Description of Artificial Sequence: Synthetic oligonucleotide"
  source 1..25: mol_type = other RNA
aagaatcatggatatttatgaatta

SEQ ID NO: 2328 - RNA, 25 nt, synthetic construct
  misc_feature 1..25: note = source = /note="Description of Artificial Sequence: Synthetic oligonucleotide"
  source 1..25: mol_type = other RNA
atggatatttatgaattaaggtaag

SEQ ID NO: 2329 - RNA, 25 nt, synthetic construct
  misc_feature 1..25: note = source = /note="Description of Artificial Sequence: Synthetic oligonucleotide"
  source 1..25: mol_type = other RNA
tatttatgaattaaggtaagaggtg

SEQ ID NO: 2330 - RNA, 25 nt, synthetic construct
  misc_feature 1..25: note = source = /note="Description of Artificial Sequence: Synthetic oligonucleotide"
  source 1..25: mol_type = other RNA
ttccagccgttgaccaattatagtt

SEQ ID NO: 2331 - RNA, 25 nt, synthetic construct
  misc_feature 1..25: note = source = /note="Description of Artificial Sequence: Synthetic oligonucleotide"
  source 1..25: mol_type = other RNA
gttcggctgttgactgagaagtttg

SEQ ID NO: 2332 - RNA, 25 nt, synthetic construct
  misc_feature 1..25: note = source = /note="Description of Artificial Sequence: Synthetic oligonucleotide"
  source 1..25: mol_type = other RNA
cggctgttgactgagaagtttgtgg

SEQ ID NO: 2333 - RNA, 25 nt, synthetic construct
  misc_feature 1..25: note = source = /note="Description of Artificial Sequence: Synthetic oligonucleotide"
  source 1..25: mol_type = other RNA
ggctgttgactgagaagtttgtggt

SEQ ID NO: 2334 - RNA, 25 nt, synthetic construct
  misc_feature 1..25: note = source = /note="Description of Artificial Sequence: Synthetic oligonucleotide"
  source 1..25: mol_type = other RNA
aataattgtcttgtacttagaaaaa

SEQ ID NO: 2335 - RNA, 25 nt, synthetic construct
  misc_feature 1..25: note = source = /note="Description of Artificial Sequence: Synthetic oligonucleotide"
  source 1..25: mol_type = other RNA
ggcgtctatgaatgaccagtgtttt

SEQ ID NO: 2336 - RNA, 25 nt, synthetic construct
  misc_feature 1..25: note = source = /note="Description of Artificial Sequence: Synthetic oligonucleotide"
  source 1..25: mol_type = other RNA
tgacaaacttatcccaaaactttag

SEQ ID NO: 2337 - RNA, 25 nt, synthetic construct
  misc_feature 1..25: note = source = /note="Description of Artificial Sequence: Synthetic oligonucleotide"
  source 1..25: mol_type = other RNA
cccccaactgttagtcaatctgagc

SEQ ID NO: 2338 - RNA, 25 nt, synthetic construct
  misc_feature 1..25: note = source = /note="Description of Artificial Sequence: Synthetic oligonucleotide"
  source 1..25: mol_type = other RNA
ccccaactgttagtcaatctgagct

SEQ ID NO: 2339 - RNA, 25 nt, synthetic construct
  misc_feature 1..25: note = source = /note="Description of Artificial Sequence: Synthetic oligonucleotide"
  source 1..25: mol_type = other RNA
ttagtcaatctgagctgggctcagc

SEQ ID NO: 2340 - RNA, 25 nt, synthetic construct
  misc_feature 1..25: note = source = /note="Description of Artificial Sequence: Synthetic oligonucleotide"
  source 1..25: mol_type = other RNA
tagtcaatctgagctgggctcagct

SEQ ID NO: 2341 - RNA, 25 nt, synthetic construct
  misc_feature 1..25: note = source = /note="Description of Artificial Sequence: Synthetic oligonucleotide"
  source 1..25: mol_type = other RNA
ctgggctgttcttctgccagcctgc

SEQ ID NO: 2342 - RNA, 25 nt, synthetic construct
  misc_feature 1..25: note = source = /note="Description of Artificial Sequence: Synthetic oligonucleotide"
  source 1..25: mol_type = other RNA
ggctgttcttctgccagcctgcagg

SEQ ID NO: 2343 - RNA, 25 nt, synthetic construct
  misc_feature 1..25: note = source = /note="Description of Artificial Sequence: Synthetic oligonucleotide"
  source 1..25: mol_type = other RNA
gccagcctgcaggtggccactcatg

SEQ ID NO: 2344 - RNA, 25 nt, synthetic construct
  misc_feature 1..25: note = source = /note="Description of Artificial Sequence: Synthetic oligonucleotide"
  source 1..25: mol_type = other RNA
gcaggtggccactcatgtggtcagc

SEQ ID NO: 2345 - RNA, 25 nt, synthetic construct
  misc_feature 1..25: note = source = /note="Description of Artificial Sequence: Synthetic oligonucleotide"
  source 1..25: mol_type = other RNA
gtggccactcatgtggtcagcaggt

SEQ ID NO: 2346 - RNA, 25 nt, synthetic construct
  misc_feature 1..25: note = source = /note="Description of Artificial Sequence: Synthetic oligonucleotide"
  source 1..25: mol_type = other RNA
gccactcatgtggtcagcaggtcgg

SEQ ID NO: 2347 - RNA, 25 nt, synthetic construct
  misc_feature 1..25: note = source = /note="Description of Artificial Sequence: Synthetic oligonucleotide"
  source 1..25: mol_type = other RNA
gtggtcagcaggtcggcggagagac

SEQ ID NO: 2348 - RNA, 25 nt, synthetic construct
  misc_feature 1..25: note = source = /note="Description of Artificial Sequence: Synthetic oligonucleotide"
  source 1..25: mol_type = other RNA
tggtcagcaggtcggcggagagact

SEQ ID NO: 2349 - RNA, 25 nt, synthetic construct
  misc_feature 1..25: note = source = /note="Description of Artificial Sequence: Synthetic oligonucleotide"
  source 1..25: mol_type = other RNA
cagcaggtcggcggagagactggga

SEQ ID NO: 2350 - RNA, 25 nt, synthetic construct
  misc_feature 1..25: note = source = /note="Description of Artificial Sequence: Synthetic oligonucleotide"
  source 1..25: mol_type = other RNA
aggtcggcggagagactgggatggc

SEQ ID NO: 2351 - RNA, 25 nt, synthetic construct
  misc_feature 1..25: note = source = /note="Description of Artificial Sequence: Synthetic oligonucleotide"
  source 1..25: mol_type = other RNA
ggtcggcggagagactgggatggct

SEQ ID NO: 2352 - RNA, 25 nt, synthetic construct
  misc_feature 1..25: note = source = /note="Description of Artificial Sequence: Synthetic oligonucleotide"
  source 1..25: mol_type = other RNA
tccttcttcgtgtagtctctttcag

SEQ ID NO: 2353 - RNA, 25 nt, synthetic construct
  misc_feature 1..25: note = source = /note="Description of Artificial Sequence: Synthetic oligonucleotide"
  source 1..25: mol_type = other RNA
cttcgtgtagtctctttcagtggcc

SEQ ID NO: 2354 - RNA, 25 nt, synthetic construct
  misc_feature 1..25: note = source = /note="Description of Artificial Sequence: Synthetic oligonucleotide"
  source 1..25: mol_type = other RNA
gtgtagtctctttcagtggcctggc

SEQ ID NO: 2355 - RNA, 25 nt, synthetic construct
  misc_feature 1..25: note = source = /note="Description of Artificial Sequence: Synthetic oligonucleotide"
  source 1..25: mol_type = other RNA
agtctctttcagtggcctggctggc

SEQ ID NO: 2356 - RNA, 25 nt, synthetic construct
  misc_feature 1..25: note = source = /note="Description of Artificial Sequence: Synthetic oligonucleotide"
  source 1..25: mol_type = other RNA
gtctctttcagtggcctggctggca

SEQ ID NO: 2357 - RNA, 25 nt, synthetic construct
  misc_feature 1..25: note = source = /note="Description of Artificial Sequence: Synthetic oligonucleotide"
  source 1..25: mol_type = other RNA
gctcccaagagctcaaaagcagaaa

SEQ ID NO: 2358 - RNA, 25 nt, synthetic construct
  misc_feature 1..25: note = source = /note="Description of Artificial Sequence: Synthetic oligonucleotide"
  source 1..25: mol_type = other RNA
caagagctcaaaagcagaaatggcc

SEQ ID NO: 2359 - RNA, 25 nt, synthetic construct
  misc_feature 1..25: note = source = /note="Description of Artificial Sequence: Synthetic oligonucleotide"
  source 1..25: mol_type = other RNA
atgatgatgatgatgatgatgatga

SEQ ID NO: 2360 - RNA, 25 nt, synthetic construct
  misc_feature 1..25: note = source = /note="Description of Artificial Sequence: Synthetic oligonucleotide"
  source 1..25: mol_type = other RNA
tggttttttctaatcagaagaaagc

SEQ ID NO: 2361 - RNA, 25 nt, synthetic construct
  misc_feature 1..25: note = source = /note="Description of Artificial Sequence: Synthetic oligonucleotide"
  source 1..25: mol_type = other RNA
ggttttttctaatcagaagaaagct

SEQ ID NO: 2362 - RNA, 25 nt, synthetic construct
  misc_feature 1..25: note = source = /note="Description of Artificial Sequence: Synthetic oligonucleotide"
  source 1..25: mol_type = other RNA
gttttttctaatcagaagaaagctg

SEQ ID NO: 2363 - RNA, 25 nt, synthetic construct
  misc_feature 1..25: note = source = /note="Description of Artificial Sequence: Synthetic oligonucleotide"
  source 1..25: mol_type = other RNA
acaagcccagctcagattcaagaaa

SEQ ID NO: 2364 - RNA, 25 nt, synthetic construct
  misc_feature 1..25: note = source = /note="Description of Artificial Sequence: Synthetic oligonucleotide"
  source 1..25: mol_type = other RNA
caagcccagctcagattcaagaaaa

SEQ ID NO: 2365 - RNA, 25 nt, synthetic construct
  misc_feature 1..25: note = source = /note="Description of Artificial Sequence: Synthetic oligonucleotide"
  source 1..25: mol_type = other RNA
gattcaagaaaagggtgtgaagtag

SEQ ID NO: 2366 - RNA, 25 nt, synthetic construct
  misc_feature 1..25: note = source = /note="Description of Artificial Sequence: Synthetic oligonucleotide"
  source 1..25: mol_type = other RNA
ggtgtgaagtagaggtgcagttaag

SEQ ID NO: 2367 - RNA, 25 nt, synthetic construct
  misc_feature 1..25: note = source = /note="Description of Artificial Sequence: Synthetic oligonucleotide"
  source 1..25: mol_type = other RNA
gtgtgaagtagaggtgcagttaagt

SEQ ID NO: 2368 - RNA, 25 nt, synthetic construct
  misc_feature 1..25: note = source = /note="Description of Artificial Sequence: Synthetic oligonucleotide"
  source 1..25: mol_type = other RNA
tgtgaagtagaggtgcagttaagtg

SEQ ID NO: 2369 - RNA, 25 nt, synthetic construct
  misc_feature 1..25: note = source = /note="Description of Artificial Sequence: Synthetic oligonucleotide"
  source 1..25: mol_type = other RNA
gtgaagtagaggtgcagttaagtgg

SEQ ID NO: 2370 - RNA, 25 nt, synthetic construct
  misc_feature 1..25: note = source = /note="Description of Artificial Sequence: Synthetic oligonucleotide"
  source 1..25: mol_type = other RNA
tgaagtagaggtgcagttaagtggg

SEQ ID NO: 2371 - RNA, 25 nt, synthetic construct
  misc_feature 1..25: note = source = /note="Description of Artificial Sequence: Synthetic oligonucleotide"
  source 1..25: mol_type = other RNA
agtggggggccactagtctaacaga

SEQ ID NO: 2372 - RNA, 25 nt, synthetic construct
  misc_feature 1..25: note = source = /note="Description of Artificial Sequence: Synthetic oligonucleotide"
  source 1..25: mol_type = other RNA
taacagacggtcacaaccagtgcca

SEQ ID NO: 2373 - RNA, 25 nt, synthetic construct
  misc_feature 1..25: note = source = /note="Description of Artificial Sequence: Synthetic oligonucleotide"
  source 1..25: mol_type = other RNA
tcacaaccagtgccatggaaaacca

SEQ ID NO: 2374 - RNA, 25 nt, synthetic construct
  misc_feature 1..25: note = source = /note="Description of Artificial Sequence: Synthetic oligonucleotide"
  source 1..25: mol_type = other RNA
caaaagcagaagttgctagtgacct

SEQ ID NO: 2375 - RNA, 25 nt, synthetic construct
  misc_feature 1..25: note = source = /note="Description of Artificial Sequence: Synthetic oligonucleotide"
  source 1..25: mol_type = other RNA
aaaagcagaagttgctagtgacctt

SEQ ID NO: 2376 - RNA, 25 nt, synthetic construct
  misc_feature 1..25: note = source = /note="Description of Artificial Sequence: Synthetic oligonucleotide"
  source 1..25: mol_type = other RNA
ggaagccgaagctgcttacagtagc

SEQ ID NO: 2377 - RNA, 25 nt, synthetic construct
  misc_feature 1..25: note = source = /note="Description of Artificial Sequence: Synthetic oligonucleotide"
  source 1..25: mol_type = other RNA
gaagccgaagctgcttacagtagct

SEQ ID NO: 2378 - RNA, 25 nt, synthetic construct
  misc_feature 1..25: note = source = /note="Description of Artificial Sequence: Synthetic oligonucleotide"
  source 1..25: mol_type = other RNA
gaaagtcagactaagaaataaagag

SEQ ID NO: 2379 - RNA, 25 nt, synthetic construct
  misc_feature 1..25: note = source = /note="Description of Artificial Sequence: Synthetic oligonucleotide"
  source 1..25: mol_type = other RNA
aaagtcagactaagaaataaagaga

SEQ ID NO: 2380 - RNA, 25 nt, synthetic construct
  misc_feature 1..25: note = source = /note="Description of Artificial Sequence: Synthetic oligonucleotide"
  source 1..25: mol_type = other RNA
tttctgctagccctgagcctatttt

SEQ ID NO: 2381 - RNA, 25 nt, synthetic construct
  misc_feature 1..25: note = source = /note="Description of Artificial Sequence: Synthetic oligonucleotide"
  source 1..25: mol_type = other RNA
tgagcctatttttggaaccagcact

SEQ ID NO: 2382 - RNA, 25 nt, synthetic construct
  misc_feature 1..25: note = source = /note="Description of Artificial Sequence: Synthetic oligonucleotide"
  source 1..25: mol_type = other RNA
gagcctatttttggaaccagcactt

SEQ ID NO: 2383 - RNA, 25 nt, synthetic construct
  misc_feature 1..25: note = source = /note="Description of Artificial Sequence: Synthetic oligonucleotide"
  source 1..25: mol_type = other RNA
agcctatttttggaaccagcacttg

SEQ ID NO: 2384 - RNA, 25 nt, synthetic construct
  misc_feature 1..25: note = source = /note="Description of Artificial Sequence: Synthetic oligonucleotide"
  source 1..25: mol_type = other RNA
agcacttggggaaactgatcttgtg

SEQ ID NO: 2385 - RNA, 25 nt, synthetic construct
  misc_feature 1..25: note = source = /note="Description of Artificial Sequence: Synthetic oligonucleotide"
  source 1..25: mol_type = other RNA
cttggggaaactgatcttgtgagga

SEQ ID NO: 2386 - RNA, 25 nt, synthetic construct
  misc_feature 1..25: note = source = /note="Description of Artificial Sequence: Synthetic oligonucleotide"
  source 1..25: mol_type = other RNA
tgatcttgtgaggatggatgtgttt

SEQ ID NO: 2387 - RNA, 25 nt, synthetic construct
  misc_feature 1..25: note = source = /note="Description of Artificial Sequence: Synthetic oligonucleotide"
  source 1..25: mol_type = other RNA
gatcttgtgaggatggatgtgttta

SEQ ID NO: 2388 - RNA, 25 nt, synthetic construct
  misc_feature 1..25: note = source = /note="Description of Artificial Sequence: Synthetic oligonucleotide"
  source 1..25: mol_type = other RNA
tgaggatggatgtgtttagggacac

SEQ ID NO: 2389 - RNA, 25 nt, synthetic construct
  misc_feature 1..25: note = source = /note="Description of Artificial Sequence: Synthetic oligonucleotide"
  source 1..25: mol_type = other RNA
gaggatggatgtgtttagggacaca

SEQ ID NO: 2390 - RNA, 25 nt, synthetic construct
  misc_feature 1..25: note = source = /note="Description of Artificial Sequence: Synthetic oligonucleotide"
  source 1..25: mol_type = other RNA
gcttttgagagcagcaccaccccac

SEQ ID NO: 2391 - RNA, 25 nt, synthetic construct
  misc_feature 1..25: note = source = /note="Description of Artificial Sequence: Synthetic oligonucleotide"
  source 1..25: mol_type = other RNA
cttttgagagcagcaccaccccact

SEQ ID NO: 2392 - RNA, 25 nt, synthetic construct
  misc_feature 1..25: note = source = /note="Description of Artificial Sequence: Synthetic oligonucleotide"
  source 1..25: mol_type = other RNA
ttttgagagcagcaccaccccactg

SEQ ID NO: 2393 - RNA, 25 nt, synthetic construct
  misc_feature 1..25: note = source = /note="Description of Artificial Sequence: Synthetic oligonucleotide"
  source 1..25: mol_type = other RNA
caccccactggggcatccccagact

SEQ ID NO: 2394 - RNA, 25 nt, synthetic construct
  misc_feature 1..25: note = source = /note="Description of Artificial Sequence: Synthetic oligonucleotide"
  source 1..25: mol_type = other RNA
accccactggggcatccccagactt

SEQ ID NO: 2395 - RNA, 25 nt, synthetic construct
  misc_feature 1..25: note = source = /note="Description of Artificial Sequence: Synthetic oligonucleotide"
  source 1..25: mol_type = other RNA
aaacgtgactctttcttaatgccac

SEQ ID NO: 2396 - RNA, 25 nt, synthetic construct
  misc_feature 1..25: note = source = /note="Description of Artificial Sequence: Synthetic oligonucleotide"
  source 1..25: mol_type = other RNA
aacgtgactctttcttaatgccact

SEQ ID NO: 2397 - RNA, 25 nt, synthetic construct
  misc_feature 1..25: note = source = /note="Description of Artificial Sequence: Synthetic oligonucleotide"
  source 1..25: mol_type = other RNA
ttcttaatgccactgggttttagtc

SEQ ID NO: 2398 - RNA, 25 nt, synthetic construct
  misc_feature 1..25: note = source = /note="Description of Artificial Sequence: Synthetic oligonucleotide"
  source 1..25: mol_type = other RNA
gggttttagtcaggccacagtgaga

SEQ ID NO: 2399 - RNA, 25 nt, synthetic construct
  misc_feature 1..25: note = source = /note="Description of Artificial Sequence: Synthetic oligonucleotide"
  source 1..25: mol_type = other RNA
cacagtgagaaggaacagccctaac

SEQ ID NO: 2400 - RNA, 25 nt, synthetic construct
  misc_feature 1..25: note = source = /note="Description of Artificial Sequence: Synthetic oligonucleotide"
  source 1..25: mol_type = other RNA
gaacagccctaacaggcctccagcc

SEQ ID NO: 2401 - RNA, 25 nt, synthetic construct
  misc_feature 1..25: note = source = /note="Description of Artificial Sequence: Synthetic oligonucleotide"
  source 1..25: mol_type = other RNA
gcctcatatgttgaatcatccagtg

SEQ ID NO: 2402 - RNA, 25 nt, synthetic construct
  misc_feature 1..25: note = source = /note="Description of Artificial Sequence: Synthetic oligonucleotide"
  source 1..25: mol_type = other RNA
gcggatatttcaatgaaaatatcat

SEQ ID NO: 2403 - RNA, 25 nt, synthetic construct
  misc_feature 1..25: note = source = /note="Description of Artificial Sequence: Synthetic oligonucleotide"
  source 1..25: mol_type = other RNA
aaatatcattggttgacttttgtga

SEQ ID NO: 2404 - RNA, 25 nt, synthetic construct
  misc_feature 1..25: note = source = /note="Description of Artificial Sequence: Synthetic oligonucleotide"
  source 1..25: mol_type = other RNA
gacttttgtgatggtaataatgcta

SEQ ID NO: 2405 - RNA, 25 nt, synthetic construct
  misc_feature 1..25: note = source = /note="Description of Artificial Sequence: Synthetic oligonucleotide"
  source 1..25: mol_type = other RNA
ctatggcatctttgccatgaagttg

SEQ ID NO: 2406 - RNA, 25 nt, synthetic construct
  misc_feature 1..25: note = source = /note="Description of Artificial Sequence: Synthetic oligonucleotide"
  source 1..25: mol_type = other RNA
ctttgccatgaagttgtggcctcct

SEQ ID NO: 2407 - RNA, 25 nt, synthetic construct
  misc_feature 1..25: note = source = /note="Description of Artificial Sequence: Synthetic oligonucleotide"
  source 1..25: mol_type = other RNA
tggcctccttggattcttctgactt

SEQ ID NO: 2408 - RNA, 25 nt, synthetic construct
  misc_feature 1..25: note = source = /note="Description of Artificial Sequence: Synthetic oligonucleotide"
  source 1..25: mol_type = other RNA
gattcttctgactttggcttctgaa

SEQ ID NO: 2409 - RNA, 25 nt, synthetic construct
  misc_feature 1..25: note = source = /note="Description of Artificial Sequence: Synthetic oligonucleotide"
  source 1..25: mol_type = other RNA
cttctgactttggcttctgaaagga

SEQ ID NO: 2410 - RNA, 25 nt, synthetic construct
  misc_feature 1..25: note = source = /note="Description of Artificial Sequence: Synthetic oligonucleotide"
  source 1..25: mol_type = other RNA
tgaaaggaaggcctagatccagccc

SEQ ID NO: 2411 - RNA, 25 nt, synthetic construct
  misc_feature 1..25: note = source = /note="Description of Artificial Sequence: Synthetic oligonucleotide"
  source 1..25: mol_type = other RNA
aaggaaggcctagatccagccctgg

SEQ ID NO: 2412 - RNA, 25 nt, synthetic construct
  misc_feature 1..25: note = source = /note="Description of Artificial Sequence: Synthetic oligonucleotide"
  source 1..25: mol_type = other RNA
cagccctggtggtagttcctttctg

SEQ ID NO: 2413 - RNA, 25 nt, synthetic construct
  misc_feature 1..25: note = source = /note="Description of Artificial Sequence: Synthetic oligonucleotide"
  source 1..25: mol_type = other RNA
gaggtctctcagtcccttgagactt

SEQ ID NO: 2414 - RNA, 25 nt, synthetic construct
  misc_feature 1..25: note = source = /note="Description of Artificial Sequence: Synthetic oligonucleotide"
  source 1..25: mol_type = other RNA
aggtctctcagtcccttgagacttt

SEQ ID NO: 2415 - RNA, 25 nt, synthetic construct
  misc_feature 1..25: note = source = /note="Description of Artificial Sequence: Synthetic oligonucleotide"
  source 1..25: mol_type = other RNA
ggtctctcagtcccttgagactttg

SEQ ID NO: 2416 - RNA, 25 nt, synthetic construct
  misc_feature 1..25: note = source = /note="Description of Artificial Sequence: Synthetic oligonucleotide"
  source 1..25: mol_type = other RNA
agtcccttgagactttggggtagtt

SEQ ID NO: 2417 - RNA, 25 nt, synthetic construct
  misc_feature 1..25: note = source = /note="Description of Artificial Sequence: Synthetic oligonucleotide"
  source 1..25: mol_type = other RNA
tgaactttgaattgcttcagaacac

SEQ ID NO: 2418 - RNA, 25 nt, synthetic construct
  misc_feature 1..25: note = source = /note="Description of Artificial Sequence: Synthetic oligonucleotide"
  source 1..25: mol_type = other RNA
tttgaattgcttcagaacacaggtg

SEQ ID NO: 2419 - RNA, 25 nt, synthetic construct
  misc_feature 1..25: note = source = /note="Description of Artificial Sequence: Synthetic oligonucleotide"
  source 1..25: mol_type = other RNA
gcttcagaacacaggtgtggcctga

SEQ ID NO: 2420 - RNA, 25 nt, synthetic construct
  misc_feature 1..25: note = source = /note="Description of Artificial Sequence: Synthetic oligonucleotide"
  source 1..25: mol_type = other RNA
tgtggcctgaaggtattcccttatt

SEQ ID NO: 2421 - RNA, 25 nt, synthetic construct
  misc_feature 1..25: note = source = /note="Description of Artificial Sequence: Synthetic oligonucleotide"
  source 1..25: mol_type = other RNA
gtggcctgaaggtattcccttatta

SEQ ID NO: 2422 - RNA, 25 nt, synthetic construct
  misc_feature 1..25: note = source = /note="Description of Artificial Sequence: Synthetic oligonucleotide"
  source 1..25: mol_type = other RNA
catcgactcattctccattttgctt

SEQ ID NO: 2423 - RNA, 25 nt, synthetic construct
  misc_feature 1..25: note = source = /note="Description of Artificial Sequence: Synthetic oligonucleotide"
  source 1..25: mol_type = other RNA
gttttgtcttgacttgacttgactt

SEQ ID NO: 2424 - RNA, 25 nt, synthetic construct
  misc_feature 1..25: note = source = /note="Description of Artificial Sequence: Synthetic oligonucleotide"
  source 1..25: mol_type = other RNA
ttttgtcttgacttgacttgacttt

SEQ ID NO: 2425 - RNA, 25 nt, synthetic construct
  misc_feature 1..25: note = source = /note="Description of Artificial Sequence: Synthetic oligonucleotide"
  source 1..25: mol_type = other RNA
tttgtcttgacttgacttgactttg

SEQ ID NO: 2426 - RNA, 25 nt, synthetic construct
  misc_feature 1..25: note = source = /note="Description of Artificial Sequence: Synthetic oligonucleotide"
  source 1..25: mol_type = other RNA
ttgtcttgacttgacttgactttgg

SEQ ID NO: 2427 - RNA, 25 nt, synthetic construct
  misc_feature 1..25: note = source = /note="Description of Artificial Sequence: Synthetic oligonucleotide"
  source 1..25: mol_type = other RNA
agatcagttgcttttatactcagaa

SEQ ID NO: 2428 - RNA, 25 nt, synthetic construct
  misc_feature 1..25: note = source = /note="Description of Artificial Sequence: Synthetic oligonucleotide"
  source 1..25: mol_type = other RNA
tactcagaatggaaatacctgatct

SEQ ID NO: 2429 - RNA, 25 nt, synthetic construct
  misc_feature 1..25: note = source = /note="Description of Artificial Sequence: Synthetic oligonucleotide"
  source 1..25: mol_type = other RNA
gatttcatttagatttccctccacg

SEQ ID NO: 2430 - RNA, 25 nt, synthetic construct
  misc_feature 1..25: note = source = /note="Description of Artificial Sequence: Synthetic oligonucleotide"
  source 1..25: mol_type = other RNA
aactatcatgttcttatgtaaactt

SEQ ID NO: 2431 - RNA, 25 nt, synthetic construct
  misc_feature 1..25: note = source = /note="Description of Artificial Sequence: Synthetic oligonucleotide"
  source 1..25: mol_type = other RNA
catgttcttatgtaaacttaggcca

SEQ ID NO: 2432 - RNA, 25 nt, synthetic construct
  misc_feature 1..25: note = source = /note="Description of Artificial Sequence: Synthetic oligonucleotide"
  source 1..25: mol_type = other RNA
caaggccagagttatcatagtccct

SEQ ID NO: 2433 - RNA, 25 nt, synthetic construct
  misc_feature 1..25: note = source = /note="Description of Artificial Sequence: Synthetic oligonucleotide"
  source 1..25: mol_type = other RNA
agttatcatagtccctaggttgcta

SEQ ID NO: 2434 - RNA, 25 nt, synthetic construct
  misc_feature 1..25: note = source = /note="Description of Artificial Sequence: Synthetic oligonucleotide"
  source 1..25: mol_type = other RNA
aggttgctacggcttatcatgtgct

SEQ ID NO: 2435 - RNA, 25 nt, synthetic construct
  misc_feature 1..25: note = source = /note="Description of Artificial Sequence: Synthetic oligonucleotide"
  source 1..25: mol_type = other RNA
tacggcttatcatgtgcttggtaaa

SEQ ID NO: 2436 - RNA, 25 nt, synthetic construct
  misc_feature 1..25: note = source = /note="Description of Artificial Sequence: Synthetic oligonucleotide"
  source 1..25: mol_type = other RNA
catgtgcttggtaaaaggtgatcgc

SEQ ID NO: 2437 - RNA, 25 nt, synthetic construct
  misc_feature 1..25: note = source = /note="Description of Artificial Sequence: Synthetic oligonucleotide"
  source 1..25: mol_type = other RNA
tcagacgagtttactttacatgaga

SEQ ID NO: 2438 - RNA, 25 nt, synthetic construct
  misc_feature 1..25: note = source = /note="Description of Artificial Sequence: Synthetic oligonucleotide"
  source 1..25: mol_type = other RNA
agtttactttacatgagatggaatc

SEQ ID NO: 2439 - RNA, 25 nt, synthetic construct
  misc_feature 1..25: note = source = /note="Description of Artificial Sequence: Synthetic oligonucleotide"
  source 1..25: mol_type = other RNA
ttacatgagatggaatcaggcagag

SEQ ID NO: 2440 - RNA, 25 nt, synthetic construct
  misc_feature 1..25: note = source = /note="Description of Artificial Sequence: Synthetic oligonucleotide"
  source 1..25: mol_type = other RNA
atgagatggaatcaggcagagaggc

SEQ ID NO: 2441 - RNA, 25 nt, synthetic construct
  misc_feature 1..25: note = source = /note="Description of Artificial Sequence: Synthetic oligonucleotide"
  source 1..25: mol_type = other RNA
tgagatggaatcaggcagagaggct

SEQ ID NO: 2442 - RNA, 25 nt, synthetic construct
  misc_feature 1..25: note = source = /note="Description of Artificial Sequence: Synthetic oligonucleotide"
  source 1..25: mol_type = other RNA
gaatcaggcagagaggctgggatga

SEQ ID NO: 2443 - RNA, 25 nt, synthetic construct
  misc_feature 1..25: note = source = /note="Description of Artificial Sequence: Synthetic oligonucleotide"
  source 1..25: mol_type = other RNA
aggctgggatgatggagaaagctcg

SEQ ID NO: 2444 - RNA, 25 nt, synthetic construct
  misc_feature 1..25: note = source = /note="Description of Artificial Sequence: Synthetic oligonucleotide"
  source 1..25: mol_type = other RNA
aggtgaagttttaaaaaaaaagttg

SEQ ID NO: 2445 - RNA, 25 nt, synthetic construct
  misc_feature 1..25: note = source = /note="Description of Artificial Sequence: Synthetic oligonucleotide"
  source 1..25: mol_type = other RNA
aagttttaaaaaaaaagttgtggaa

SEQ ID NO: 2446 - RNA, 25 nt, synthetic construct
  misc_feature 1..25: note = source = /note="Description of Artificial Sequence: Synthetic oligonucleotide"
  source 1..25: mol_type = other RNA
agttgtggaaaggaaagttccaaag

SEQ ID NO: 2447 - RNA, 25 nt, synthetic construct
  misc_feature 1..25: note = source = /note="Description of Artificial Sequence: Synthetic oligonucleotide"
  source 1..25: mol_type = other RNA
tgtggaaaggaaagttccaaagagg

SEQ ID NO: 2448 - RNA, 25 nt, synthetic construct
  misc_feature 1..25: note = source = /note="Description of Artificial Sequence: Synthetic oligonucleotide"
  source 1..25: mol_type = other RNA
gaaagttccaaagaggtggtttctg

SEQ ID NO: 2449 - RNA, 25 nt, synthetic construct
  misc_feature 1..25: note = source = /note="Description of Artificial Sequence: Synthetic oligonucleotide"
  source 1..25: mol_type = other RNA
ggtttctgaggaagtcagagcgccc

SEQ ID NO: 2450 - RNA, 25 nt, synthetic construct
  misc_feature 1..25: note = source = /note="Description of Artificial Sequence: Synthetic oligonucleotide"
  source 1..25: mol_type = other RNA
gtttctgaggaagtcagagcgccca

SEQ ID NO: 2451 - RNA, 25 nt, synthetic construct
  misc_feature 1..25: note = source = /note="Description of Artificial Sequence: Synthetic oligonucleotide"
  source 1..25: mol_type = other RNA
cgcccagggccagagcagtcagtaa

SEQ ID NO: 2452 - RNA, 25 nt, synthetic construct
  misc_feature 1..25: note = source = /note="Description of Artificial Sequence: Synthetic oligonucleotide"
  source 1..25: mol_type = other RNA
gcccagggccagagcagtcagtaat

SEQ ID NO: 2453 - RNA, 25 nt, synthetic construct
  misc_feature 1..25: note = source = /note="Description of Artificial Sequence: Synthetic oligonucleotide"
  source 1..25: mol_type = other RNA
cagagcagtcagtaatgggtgaatg

SEQ ID NO: 2454 - RNA, 25 nt, synthetic construct
  misc_feature 1..25: note = source = /note="Description of Artificial Sequence: Synthetic oligonucleotide"
  source 1..25: mol_type = other RNA
tcagtaatgggtgaatgaggttgtt

SEQ ID NO: 2455 - RNA, 25 nt, synthetic construct
  misc_feature 1..25: note = source = /note="Description of Artificial Sequence: Synthetic oligonucleotide"
  source 1..25: mol_type = other RNA
gggtgaatgaggttgtttggaaagt

SEQ ID NO: 2456 - RNA, 25 nt, synthetic construct
  misc_feature 1..25: note = source = /note="Description of Artificial Sequence: Synthetic oligonucleotide"
  source 1..25: mol_type = other RNA
ttggaaagtcggtgtgacagacaca

SEQ ID NO: 2457 - RNA, 25 nt, synthetic construct
  misc_feature 1..25: note = source = /note="Description of Artificial Sequence: Synthetic oligonucleotide"
  source 1..25: mol_type = other RNA
agacacatggatgccatctacttct

SEQ ID NO: 2458 - RNA, 25 nt, synthetic construct
  misc_feature 1..25: note = source = /note="Description of Artificial Sequence: Synthetic oligonucleotide"
  source 1..25: mol_type = other RNA
tggatgccatctacttctaggttgc

SEQ ID NO: 2459 - RNA, 25 nt, synthetic construct
  misc_feature 1..25: note = source = /note="Description of Artificial Sequence: Synthetic oligonucleotide"
  source 1..25: mol_type = other RNA
atgccatctacttctaggttgctgg

SEQ ID NO: 2460 - RNA, 25 nt, synthetic construct
  misc_feature 1..25: note = source = /note="Description of Artificial Sequence: Synthetic oligonucleotide"
  source 1..25: mol_type = other RNA
tgccatctacttctaggttgctggt

SEQ ID NO: 2461 - RNA, 25 nt, synthetic construct
  misc_feature 1..25: note = source = /note="Description of Artificial Sequence: Synthetic oligonucleotide"
  source 1..25: mol_type = other RNA
atgcacaatattccatagctcactg

SEQ ID NO: 2462 - RNA, 25 nt, synthetic construct
  misc_feature 1..25: note = source = /note="Description of Artificial Sequence: Synthetic oligonucleotide"
  source 1..25: mol_type = other RNA
ctgaggattttaaaattataagcat

SEQ ID NO: 2463 - RNA, 25 nt, synthetic construct
  misc_feature 1..25: note = source = /note="Description of Artificial Sequence: Synthetic oligonucleotide"
  source 1..25: mol_type = other RNA
attataagcataggattttatattt

SEQ ID NO: 2464 - RNA, 25 nt, synthetic construct
  misc_feature 1..25: note = source = /note="Description of Artificial Sequence: Synthetic oligonucleotide"
  source 1..25: mol_type = other RNA
ttataagcataggattttatatttt

SEQ ID NO: 2465 - RNA, 25 nt, synthetic construct
  misc_feature 1..25: note = source = /note="Description of Artificial Sequence: Synthetic oligonucleotide"
  source 1..25: mol_type = other RNA
tataagcataggattttatattttg

SEQ ID NO: 2466 - RNA, 25 nt, synthetic construct
  misc_feature 1..25: note = source = /note="Description of Artificial Sequence: Synthetic oligonucleotide"
  source 1..25: mol_type = other RNA
tatattttggggtgaaagaattatc

SEQ ID NO: 2467 - RNA, 25 nt, synthetic construct
  misc_feature 1..25: note = source = /note="Description of Artificial Sequence: Synthetic oligonucleotide"
  source 1..25: mol_type = other RNA
gggtgaaagaattatctggcacatt

SEQ ID NO: 2468 - RNA, 25 nt, synthetic construct
  misc_feature 1..25: note = source = /note="Description of Artificial Sequence: Synthetic oligonucleotide"
  source 1..25: mol_type = other RNA
aagaattatctggcacattaggtat

SEQ ID NO: 2469 - RNA, 25 nt, synthetic construct
  misc_feature 1..25: note = source = /note="Description of Artificial Sequence: Synthetic oligonucleotide"
  source 1..25: mol_type = other RNA
ataactttttttaaaaaaaactaaa

SEQ ID NO: 2470 - RNA, 25 nt, synthetic construct
  misc_feature 1..25: note = source = /note="Description of Artificial Sequence: Synthetic oligonucleotide"
  source 1..25: mol_type = other RNA
taaaaggcgcttcatgtccagtgtg

SEQ ID NO: 2471 - RNA, 25 nt, synthetic construct
  misc_feature 1..25: note = source = /note="Description of Artificial Sequence: Synthetic oligonucleotide"
  source 1..25: mol_type = other RNA
cagtgtgtggcccttctgaaactta

SEQ ID NO: 2472 - RNA, 25 nt, synthetic construct
  misc_feature 1..25: note = source = /note="Description of Artificial Sequence: Synthetic oligonucleotide"
  source 1..25: mol_type = other RNA
atggtcatctctcccactgaaacca

SEQ ID NO: 2473 - RNA, 25 nt, synthetic construct
  misc_feature 1..25: note = source = /note="Description of Artificial Sequence: Synthetic oligonucleotide"
  source 1..25: mol_type = other RNA
actgaaaccaaggtcttttcaaatg

SEQ ID NO: 2474 - RNA, 25 nt, synthetic construct
  misc_feature 1..25: note = source = /note="Description of Artificial Sequence: Synthetic oligonucleotide"
  source 1..25: mol_type = other RNA
caaggtcttttcaaatgtggctaaa

SEQ ID NO: 2475 - RNA, 25 nt, synthetic construct
  misc_feature 1..25: note = source = /note="Description of Artificial Sequence: Synthetic oligonucleotide"
  source 1..25: mol_type = other RNA
aaggtcttttcaaatgtggctaaat

SEQ ID NO: 2476 - RNA, 25 nt, synthetic construct
  misc_feature 1..25: note = source = /note="Description of Artificial Sequence: Synthetic oligonucleotide"
  source 1..25: mol_type = other RNA
aggtcttttcaaatgtggctaaatg

SEQ ID NO: 2477 - RNA, 25 nt, synthetic construct
  misc_feature 1..25: note = source = /note="Description of Artificial Sequence: Synthetic oligonucleotide"
  source 1..25: mol_type = other RNA
tttcaaatgtggctaaatggggatg

SEQ ID NO: 2478 - RNA, 25 nt, synthetic construct
  misc_feature 1..25: note = source = /note="Description of Artificial Sequence: Synthetic oligonucleotide"
  source 1..25: mol_type = other RNA
gtggctaaatggggatgaggagaca

SEQ ID NO: 2479 - RNA, 25 nt, synthetic construct
  misc_feature 1..25: note = source = /note="Description of Artificial Sequence: Synthetic oligonucleotide"
  source 1..25: mol_type = other RNA
tggctaaatggggatgaggagacac

SEQ ID NO: 2480 - RNA, 25 nt, synthetic construct
  misc_feature 1..25: note = source = /note="Description of Artificial Sequence: Synthetic oligonucleotide"
  source 1..25: mol_type = other RNA
taaatggggatgaggagacacgggt

SEQ ID NO: 2481 - RNA, 25 nt, synthetic construct
  misc_feature 1..25: note = source = /note="Description of Artificial Sequence: Synthetic oligonucleotide"
  source 1..25: mol_type = other RNA
tgaggagacacgggtaggactttct

SEQ ID NO: 2482 - RNA, 25 nt, synthetic construct
  misc_feature 1..25: note = source = /note="Description of Artificial Sequence: Synthetic oligonucleotide"
  source 1..25: mol_type = other RNA
cattctttaaagagccaagttgctt

SEQ ID NO: 2483 - RNA, 25 nt, synthetic construct
  misc_feature 1..25: note = source = /note="Description of Artificial Sequence: Synthetic oligonucleotide"
  source 1..25: mol_type = other RNA
attctttaaagagccaagttgcttc

SEQ ID NO: 2484 - RNA, 25 nt, synthetic construct
  misc_feature 1..25: note = source = /note="Description of Artificial Sequence: Synthetic oligonucleotide"
  source 1..25: mol_type = other RNA
ttctttaaagagccaagttgcttcg

SEQ ID NO: 2485 - RNA, 25 nt, synthetic construct
  misc_feature 1..25: note = source = /note="Description of Artificial Sequence: Synthetic oligonucleotide"
  source 1..25: mol_type = other RNA
gccaagttgcttcggggaaacagcc

SEQ ID NO: 2486 - RNA, 25 nt, synthetic construct
  misc_feature 1..25: note = source = /note="Description of Artificial Sequence: Synthetic oligonucleotide"
  source 1..25: mol_type = other RNA
tgcttcggggaaacagccaggaaaa

SEQ ID NO: 2487 - RNA, 25 nt, synthetic construct
  misc_feature 1..25: note = source = /note="Description of Artificial Sequence: Synthetic oligonucleotide"
  source 1..25: mol_type = other RNA
ggaaaatggtcaagattatttttag

SEQ ID NO: 2488 - RNA, 25 nt, synthetic construct
  misc_feature 1..25: note = source = /note="Description of Artificial Sequence: Synthetic oligonucleotide"
  source 1..25: mol_type = other RNA
agattatttttagaggttattttat

SEQ ID NO: 2489 - RNA, 25 nt, synthetic construct
  misc_feature 1..25: note = source = /note="Description of Artificial Sequence: Synthetic oligonucleotide"
  source 1..25: mol_type = other RNA
gattatttttagaggttattttatt

SEQ ID NO: 2490 - RNA, 25 nt, synthetic construct
  misc_feature 1..25: note = source = /note="Description of Artificial Sequence: Synthetic oligonucleotide"
  source 1..25: mol_type = other RNA
attatttttagaggttattttattg

SEQ ID NO: 2491 - RNA, 25 nt, synthetic construct
  misc_feature 1..25: note = source = /note="Description of Artificial Sequence: Synthetic oligonucleotide"
  source 1..25: mol_type = other RNA
taacatcttgagttatttttaattc

SEQ ID NO: 2492 - RNA, 25 nt, synthetic construct
  misc_feature 1..25: note = source = /note="Description of Artificial Sequence: Synthetic oligonucleotide"
  source 1..25: mol_type = other RNA
aacatcttgagttatttttaattca

SEQ ID NO: 2493 - RNA, 25 nt, synthetic construct
  misc_feature 1..25: note = source = /note="Description of Artificial Sequence: Synthetic oligonucleotide"
  source 1..25: mol_type = other RNA
acatcttgagttatttttaattcag

SEQ ID NO: 2494 - RNA, 25 nt, synthetic construct
  misc_feature 1..25: note = source = /note="Description of Artificial Sequence: Synthetic oligonucleotide"
  source 1..25: mol_type = other RNA
catcttgagttatttttaattcagg

SEQ ID NO: 2495 - RNA, 25 nt, synthetic construct
  misc_feature 1..25: note = source = /note="Description of Artificial Sequence: Synthetic oligonucleotide"
  source 1..25: mol_type = other RNA
gagttatttttaattcagggggatg

SEQ ID NO: 2496 - RNA, 25 nt, synthetic construct
  misc_feature 1..25: note = source = /note="Description of Artificial Sequence: Synthetic oligonucleotide"
  source 1..25: mol_type = other RNA
atttttaattcagggggatgtggaa

SEQ ID NO: 2497 - RNA, 25 nt, synthetic construct
  misc_feature 1..25: note = source = /note="Description of Artificial Sequence: Synthetic oligonucleotide"
  source 1..25: mol_type = other RNA
gttttgttgtagcttagtatccata

SEQ ID NO: 2498 - RNA, 25 nt, synthetic construct
  misc_feature 1..25: note = source = /note="Description of Artificial Sequence: Synthetic oligonucleotide"
  source 1..25: mol_type = other RNA
ttttgttgtagcttagtatccataa

SEQ ID NO: 2499 - RNA, 25 nt, synthetic construct
  misc_feature 1..25: note = source = /note="Description of Artificial Sequence: Synthetic oligonucleotide"
  source 1..25: mol_type = other RNA
gcagcttttgttttctgtatgttgt

SEQ ID NO: 2500 - RNA, 25 nt, synthetic construct
  misc_feature 1..25: note = source = /note="Description of Artificial Sequence: Synthetic oligonucleotide"
  source 1..25: mol_type = other RNA
cagcttttgttttctgtatgttgtt

SEQ ID NO: 2501 - RNA, 25 nt, synthetic construct
  misc_feature 1..25: note = source = /note="Description of Artificial Sequence: Synthetic oligonucleotide"
  source 1..25: mol_type = other RNA
agcttttgttttctgtatgttgttg

SEQ ID NO: 2502 - RNA, 25 nt, synthetic construct
  misc_feature 1..25: note = source = /note="Description of Artificial Sequence: Synthetic oligonucleotide"
  source 1..25: mol_type = other RNA
gcttttgttttctgtatgttgttgg

SEQ ID NO: 2503 - RNA, 25 nt, synthetic construct
  misc_feature 1..25: note = source = /note="Description of Artificial Sequence: Synthetic oligonucleotide"
  source 1..25: mol_type = other RNA
tcaactttcacacatagcaagcaca

SEQ ID NO: 2504 - RNA, 25 nt, synthetic construct
  misc_feature 1..25: note = source = /note="Description of Artificial Sequence: Synthetic oligonucleotide"
  source 1..25: mol_type = other RNA
gcaagcacatggcctccctgatgtc

SEQ ID NO: 2505 - RNA, 25 nt, synthetic construct
  misc_feature 1..25: note = source = /note="Description of Artificial Sequence: Synthetic oligonucleotide"
  source 1..25: mol_type = other RNA
tccctgatgtcaggatgcctttgtt

SEQ ID NO: 2506 - RNA, 25 nt, synthetic construct
  misc_feature 1..25: note = source = /note="Description of Artificial Sequence: Synthetic oligonucleotide"
  source 1..25: mol_type = other RNA
ctaaaaatttgttcctttttcacta

SEQ ID NO: 2507 - RNA, 25 nt, synthetic construct
  misc_feature 1..25: note = source = /note="Description of Artificial Sequence: Synthetic oligonucleotide"
  source 1..25: mol_type = other RNA
taaaaatttgttcctttttcactat

SEQ ID NO: 2508 - RNA, 25 nt, synthetic construct
  misc_feature 1..25: note = source = /note="Description of Artificial Sequence: Synthetic oligonucleotide"
  source 1..25: mol_type = other RNA
tttttcactatgggcagttcacaca

SEQ ID NO: 2509 - RNA, 25 nt, synthetic construct
  misc_feature 1..25: note = source = /note="Description of Artificial Sequence: Synthetic oligonucleotide"
  source 1..25: mol_type = other RNA
cacaaggcaaaaactattgaacagt

SEQ ID NO: 2510 - RNA, 25 nt, synthetic construct
  misc_feature 1..25: note = source = /note="Description of Artificial Sequence: Synthetic oligonucleotide"
  source 1..25: mol_type = other RNA
tgattcttttattaataaaagctaa

SEQ ID NO: 2511 - RNA, 25 nt, synthetic construct
  misc_feature 1..25: note = source = /note="Description of Artificial Sequence: Synthetic oligonucleotide"
  source 1..25: mol_type = other RNA
gattcttttattaataaaagctaat

SEQ ID NO: 2512 - RNA, 25 nt, synthetic construct
  misc_feature 1..25: note = source = /note="Description of Artificial Sequence: Synthetic oligonucleotide"
  source 1..25: mol_type = other RNA
tttattaataaaagctaatgggaaa

SEQ ID NO: 2513 - RNA, 25 nt, synthetic construct
  misc_feature 1..25: note = source = /note="Description of Artificial Sequence: Synthetic oligonucleotide"
  source 1..25: mol_type = other RNA
tttattgataaatctatcctttaaa

SEQ ID NO: 2514 - RNA, 25 nt, synthetic construct
  misc_feature 1..25: note = source = /note="Description of Artificial Sequence: Synthetic oligonucleotide"
  source 1..25: mol_type = other RNA
ctatcctttaaaaggaatacgtttt

SEQ ID NO: 2515 - RNA, 25 nt, synthetic construct
  misc_feature 1..25: note = source = /note="Description of Artificial Sequence: Synthetic oligonucleotide"
  source 1..25: mol_type = other RNA
aatagtttatgtagagaaacattag

SEQ ID NO: 2516 - RNA, 25 nt, synthetic construct
  misc_feature 1..25: note = source = /note="Description of Artificial Sequence: Synthetic oligonucleotide"
  source 1..25: mol_type = other RNA
ttaattgtctccccacctatattta

SEQ ID NO: 2517 - RNA, 25 nt, synthetic construct
  misc_feature 1..25: note = source = /note="Description of Artificial Sequence: Synthetic oligonucleotide"
  source 1..25: mol_type = other RNA
taattgtctccccacctatatttat

SEQ ID NO: 2518 - RNA, 25 nt, synthetic construct
  misc_feature 1..25: note = source = /note="Description of Artificial Sequence: Synthetic oligonucleotide"
  source 1..25: mol_type = other RNA
agtaaaagtgtatttgtaaactgta

SEQ ID NO: 2519 - RNA, 25 nt, synthetic construct
  misc_feature 1..25: note = source = /note="Description of Artificial Sequence: Synthetic oligonucleotide"
  source 1..25: mol_type = other RNA
gtaaaagtgtatttgtaaactgtat

SEQ ID NO: 2520 - RNA, 25 nt, synthetic construct
  misc_feature 1..25: note = source = /note="Description of Artificial Sequence: Synthetic oligonucleotide"
  source 1..25: mol_type = other RNA
gtaaactgtatgggaactaaaaatt

SEQ ID NO: 2521 - RNA, 25 nt, synthetic construct
  misc_feature 1..25: note = source = /note="Description of Artificial Sequence: Synthetic oligonucleotide"
  source 1..25: mol_type = other RNA
ggaataaaaccattttcttatatga

SEQ ID NO: 2522 - RNA, 25 nt, synthetic construct
  misc_feature 1..25: note = source = /note="Description of Artificial Sequence: Synthetic oligonucleotide"
  source 1..25: mol_type = other RNA
gggagagggtgaaagtccacatctg

SEQ ID NO: 2523 - RNA, 25 nt, synthetic construct
  misc_feature 1..25: note = source = /note="Description of Artificial Sequence: Synthetic oligonucleotide"
  source 1..25: mol_type = other RNA
agggagagggtgaaagtccacatct

SEQ ID NO: 2524 - RNA, 25 nt, synthetic construct
  misc_feature 1..25: note = source = /note="Description of Artificial Sequence: Synthetic oligonucleotide"
  source 1..25: mol_type = other RNA
tagggagagggtgaaagtccacatc

SEQ ID NO: 2525 - RNA, 25 nt, synthetic construct
  misc_feature 1..25: note = source = /note="Description of Artificial Sequence: Synthetic oligonucleotide"
  source 1..25: mol_type = other RNA
tctgttcttgatctttttagggaga

SEQ ID NO: 2526 - RNA, 25 nt, synthetic construct
  misc_feature 1..25: note = source = /note="Description of Artificial Sequence: Synthetic oligonucleotide"
  source 1..25: mol_type = other RNA
gtctgttcttgatctttttagggag

SEQ ID NO: 2527 - RNA, 25 nt, synthetic construct
  misc_feature 1..25: note = source = /note="Description of Artificial Sequence: Synthetic oligonucleotide"
  source 1..25: mol_type = other RNA
cttgcgtctgttcttgatcttttta

SEQ ID NO: 2528 - RNA, 25 nt, synthetic construct
  misc_feature 1..25: note = source = /note="Description of Artificial Sequence: Synthetic oligonucleotide"
  source 1..25: mol_type = other RNA
tcttgcgtctgttcttgatcttttt

SEQ ID NO: 2529 - RNA, 25 nt, synthetic construct
  misc_feature 1..25: note = source = /note="Description of Artificial Sequence: Synthetic oligonucleotide"
  source 1..25: mol_type = other RNA
atggtttcaaattttgcttatcaaa

SEQ ID NO: 2530 - RNA, 25 nt, synthetic construct
  misc_feature 1..25: note = source = /note="Description of Artificial Sequence: Synthetic oligonucleotide"
  source 1..25: mol_type = other RNA
gagttaaaatacagtggtctttaaa

SEQ ID NO: 2531 - RNA, 25 nt, synthetic construct
  misc_feature 1..25: note = source = /note="Description of Artificial Sequence: Synthetic oligonucleotide"
  source 1..25: mol_type = other RNA
caggtattgttgagttaaaatacag

SEQ ID NO: 2532 - RNA, 25 nt, synthetic construct
  misc_feature 1..25: note = source = /note="Description of Artificial Sequence: Synthetic oligonucleotide"
  source 1..25: mol_type = other RNA
ctgaggaaatgagtaattgggaagc

SEQ ID NO: 2533 - RNA, 25 nt, synthetic construct
  misc_feature 1..25: note = source = /note="Description of Artificial Sequence: Synthetic oligonucleotide"
  source 1..25: mol_type = other RNA
ttcttatctgaggaaatgagtaatt

SEQ ID NO: 2534 - RNA, 25 nt, synthetic construct
  misc_feature 1..25: note = source = /note="Description of Artificial Sequence: Synthetic oligonucleotide"
  source 1..25: mol_type = other RNA
cttcttatctgaggaaatgagtaat

SEQ ID NO: 2535 - RNA, 25 nt, synthetic construct
  misc_feature 1..25: note = source = /note="Description of Artificial Sequence: Synthetic oligonucleotide"
  source 1..25: mol_type = other RNA
tgtagagatgatttcttcttatctg

SEQ ID NO: 2536 - RNA, 25 nt, synthetic construct
  misc_feature 1..25: note = source = /note="Description of Artificial Sequence: Synthetic oligonucleotide"
  source 1..25: mol_type = other RNA
ggaaaaaaaaaattaaactggttaa

SEQ ID NO: 2537 - RNA, 25 nt, synthetic construct
  misc_feature 1..25: note = source = /note="Description of Artificial Sequence: Synthetic oligonucleotide"
  source 1..25: mol_type = other RNA
aggaaaaaaaaaattaaactggtta

SEQ ID NO: 2538 - RNA, 25 nt, synthetic construct
  misc_feature 1..25: note = source = /note="Description of Artificial Sequence: Synthetic oligonucleotide"
  source 1..25: mol_type = other RNA
acaatgaggaaaaaaaaaattaaac

SEQ ID NO: 2539 - RNA, 25 nt, synthetic construct
  misc_feature 1..25: note = source = /note="Description of Artificial Sequence: Synthetic oligonucleotide"
  source 1..25: mol_type = other RNA
tttcttctcatcatccccaacaatg

SEQ ID NO: 2540 - RNA, 25 nt, synthetic construct
  misc_feature 1..25: note = source = /note="Description of Artificial Sequence: Synthetic oligonucleotide"
  source 1..25: mol_type = other RNA
taaatgagattgttctcacttttct

SEQ ID NO: 2541 - RNA, 25 nt, synthetic construct
  misc_feature 1..25: note = source = /note="Description of Artificial Sequence: Synthetic oligonucleotide"
  source 1..25: mol_type = other RNA
gaattatccactactggatacatga

SEQ ID NO: 2542 - RNA, 25 nt, synthetic construct
  misc_feature 1..25: note = source = /note="Description of Artificial Sequence: Synthetic oligonucleotide"
  source 1..25: mol_type = other RNA
gccatcaaaatgaattatccactac

SEQ ID NO: 2543 - RNA, 25 nt, synthetic construct
  misc_feature 1..25: note = source = /note="Description of Artificial Sequence: Synthetic oligonucleotide"
  source 1..25: mol_type = other RNA
ctcaggcactggcttaattctcatt

SEQ ID NO: 2544 - RNA, 25 nt, synthetic construct
  misc_feature 1..25: note = source = /note="Description of Artificial Sequence: Synthetic oligonucleotide"
  source 1..25: mol_type = other RNA
gtcaacttctgacagtctcaggcac

SEQ ID NO: 2545 - RNA, 25 nt, synthetic construct
  misc_feature 1..25: note = source = /note="Description of Artificial Sequence: Synthetic oligonucleotide"
  source 1..25: mol_type = other RNA
gcaaaggtcaacttctgacagtctc

SEQ ID NO: 2546 - RNA, 25 nt, synthetic construct
  misc_feature 1..25: note = source = /note="Description of Artificial Sequence: Synthetic oligonucleotide"
  source 1..25: mol_type = other RNA
ctatgactctttaatgccagtgcaa

SEQ ID NO: 2547 - RNA, 25 nt, synthetic construct
  misc_feature 1..25: note = source = /note="Description of Artificial Sequence: Synthetic oligonucleotide"
  source 1..25: mol_type = other RNA
agccgaactataattggtcaacggc

SEQ ID NO: 2548 - RNA, 25 nt, synthetic construct
  misc_feature 1..25: note = source = /note="Description of Artificial Sequence: Synthetic oligonucleotide"
  source 1..25: mol_type = other RNA
caacagccgaactataattggtcaa

SEQ ID NO: 2549 - RNA, 25 nt, synthetic construct
  misc_feature 1..25: note = source = /note="Description of Artificial Sequence: Synthetic oligonucleotide"
  source 1..25: mol_type = other RNA
tctcagtcaacagccgaactataat

SEQ ID NO: 2550 - RNA, 25 nt, synthetic construct
  misc_feature 1..25: note = source = /note="Description of Artificial Sequence: Synthetic oligonucleotide"
  source 1..25: mol_type = other RNA
caattattcaaatgcaaagaaaata

SEQ ID NO: 2551 - RNA, 25 nt, synthetic construct
  misc_feature 1..25: note = source = /note="Description of Artificial Sequence: Synthetic oligonucleotide"
  source 1..25: mol_type = other RNA
tcgttgttttggcgaccaaaaacac

SEQ ID NO: 2552 - RNA, 25 nt, synthetic construct
  misc_feature 1..25: note = source = /note="Description of Artificial Sequence: Synthetic oligonucleotide"
  source 1..25: mol_type = other RNA
aaccctattcaaacagtcgttgttt

SEQ ID NO: 2553 - RNA, 25 nt, synthetic construct
  misc_feature 1..25: note = source = /note="Description of Artificial Sequence: Synthetic oligonucleotide"
  source 1..25: mol_type = other RNA
ccaaaaaaattcggtgatttcaaaa

SEQ ID NO: 2554 - RNA, 25 nt, synthetic construct
  misc_feature 1..25: note = source = /note="Description of Artificial Sequence: Synthetic oligonucleotide"
  source 1..25: mol_type = other RNA
tccaaaaaaattcggtgatttcaaa

SEQ ID NO: 2555 - RNA, 25 nt, synthetic construct
  misc_feature 1..25: note = source = /note="Description of Artificial Sequence: Synthetic oligonucleotide"
  source 1..25: mol_type = other RNA
gagtctaactgattgtcaacccccg

SEQ ID NO: 2556 - RNA, 25 nt, synthetic construct
  misc_feature 1..25: note = source = /note="Description of Artificial Sequence: Synthetic oligonucleotide"
  source 1..25: mol_type = other RNA
ggtcgagtctaactgattgtcaacc

SEQ ID NO: 2557 - RNA, 25 nt, synthetic construct
  misc_feature 1..25: note = source = /note="Description of Artificial Sequence: Synthetic oligonucleotide"
  source 1..25: mol_type = other RNA
gggtcgagtctaactgattgtcaac

SEQ ID NO: 2558 - RNA, 25 nt, synthetic construct
  misc_feature 1..25: note = source = /note="Description of Artificial Sequence: Synthetic oligonucleotide"
  source 1..25: mol_type = other RNA
cgggtcgagtctaactgattgtcaa

SEQ ID NO: 2559 - RNA, 25 nt, synthetic construct
  misc_feature 1..25: note = source = /note="Description of Artificial Sequence: Synthetic oligonucleotide"
  source 1..25: mol_type = other RNA
tcgggtcgagtctaactgattgtca

SEQ ID NO: 2560 - RNA, 25 nt, synthetic construct
  misc_feature 1..25: note = source = /note="Description of Artificial Sequence: Synthetic oligonucleotide"
  source 1..25: mol_type = other RNA
tggtgtactcaccggtggacgtccg

SEQ ID NO: 2561 - RNA, 25 nt, synthetic construct
  misc_feature 1..25: note = source = /note="Description of Artificial Sequence: Synthetic oligonucleotide"
  source 1..25: mol_type = other RNA
cgactggtgtactcaccggtggacg

SEQ ID NO: 2562 - RNA, 25 nt, synthetic construct
  misc_feature 1..25: note = source = /note="Description of Artificial Sequence: Synthetic oligonucleotide"
  source 1..25: mol_type = other RNA
aggcggctggacgactggtgtactc

SEQ ID NO: 2563 - RNA, 25 nt, synthetic construct
  misc_feature 1..25: note = source = /note="Description of Artificial Sequence: Synthetic oligonucleotide"
  source 1..25: mol_type = other RNA
gcttcttcctctctgagtcctgacg

SEQ ID NO: 2564 - RNA, 25 nt, synthetic construct
  misc_feature 1..25: note = source = /note="Description of Artificial Sequence: Synthetic oligonucleotide"
  source 1..25: mol_type = other RNA
tctgatgtgcttcttcctctctgag

SEQ ID NO: 2565 - RNA, 25 nt, synthetic construct
  misc_feature 1..25: note = source = /note="Description of Artificial Sequence: Synthetic oligonucleotide"
  source 1..25: mol_type = other RNA
cggtgactttctctgatgtgcttct

SEQ ID NO: 2566 - RNA, 25 nt, synthetic construct
  misc_feature 1..25: note = source = /note="Description of Artificial Sequence: Synthetic oligonucleotide"
  source 1..25: mol_type = other RNA
ctctccagatcgatgggacggtcgg

SEQ ID NO: 2567 - RNA, 25 nt, synthetic construct
  misc_feature 1..25: note = source = /note="Description of Artificial Sequence: Synthetic oligonucleotide"
  source 1..25: mol_type = other RNA
aaccctcgagactcgacgtacactc

SEQ ID NO: 2568 - RNA, 25 nt, synthetic construct
  misc_feature 1..25: note = source = /note="Description of Artificial Sequence: Synthetic oligonucleotide"
  source 1..25: mol_type = other RNA
accggtaaagacgaaaactcgagaa

SEQ ID NO: 2569 - RNA, 25 nt, synthetic construct
  misc_feature 1..25: note = source = /note="Description of Artificial Sequence: Synthetic oligonucleotide"
  source 1..25: mol_type = other RNA
gaccggtaaagacgaaaactcgaga

SEQ ID NO: 2570 - RNA, 25 nt, synthetic construct
  misc_feature 1..25: note = source = /note="Description of Artificial Sequence: Synthetic oligonucleotide"
  source 1..25: mol_type = other RNA
agacctgaattcaaaagtcttccgg

SEQ ID NO: 2571 - RNA, 25 nt, synthetic construct
  misc_feature 1..25: note = source = /note="Description of Artificial Sequence: Synthetic oligonucleotide"
  source 1..25: mol_type = other RNA
tgttaagacctgaattcaaaagtct

SEQ ID NO: 2572 - RNA, 25 nt, synthetic construct
  misc_feature 1..25: note = source = /note="Description of Artificial Sequence: Synthetic oligonucleotide"
  source 1..25: mol_type = other RNA
tcatcttccctgtgacactgttaag

SEQ ID NO: 2573 - RNA, 25 nt, synthetic construct
  misc_feature 1..25: note = source = /note="Description of Artificial Sequence: Synthetic oligonucleotide"
  source 1..25: mol_type = other RNA
agtagtagttatctcccttcatctt

SEQ ID NO: 2574 - RNA, 25 nt, synthetic construct
  misc_feature 1..25: note = source = /note="Description of Artificial Sequence: Synthetic oligonucleotide"
  source 1..25: mol_type = other RNA
tagtagtagttatctcccttcatct

SEQ ID NO: 2575 - RNA, 25 nt, synthetic construct
  misc_feature 1..25: note = source = /note="Description of Artificial Sequence: Synthetic oligonucleotide"
  source 1..25: mol_type = other RNA
gtagtagtagtagtagtagttatct

SEQ ID NO: 2576 - RNA, 25 nt, synthetic construct
  misc_feature 1..25: note = source = /note="Description of Artificial Sequence: Synthetic oligonucleotide"
  source 1..25: mol_type = other RNA
agtagtagtagtagtagtagttatc

SEQ ID NO: 2577 - RNA, 25 nt, synthetic construct
  misc_feature 1..25: note = source = /note="Description of Artificial Sequence: Synthetic oligonucleotide"
  source 1..25: mol_type = other RNA
cgaacactgaacaaatcattcatct

SEQ ID NO: 2578 - RNA, 25 nt, synthetic construct
  misc_feature 1..25: note = source = /note="Description of Artificial Sequence: Synthetic oligonucleotide"
  source 1..25: mol_type = other RNA
ccgaacactgaacaaatcattcatc

SEQ ID NO: 2579 - RNA, 25 nt, synthetic construct
  misc_feature 1..25: note = source = /note="Description of Artificial Sequence: Synthetic oligonucleotide"
  source 1..25: mol_type = other RNA
gtgtgggaaaagaacttagactcga

SEQ ID NO: 2580 - RNA, 25 nt, synthetic construct
  misc_feature 1..25: note = source = /note="Description of Artificial Sequence: Synthetic oligonucleotide"
  source 1..25: mol_type = other RNA
agtgtgggaaaagaacttagactcg

SEQ ID NO: 2581 - RNA, 25 nt, synthetic construct
  misc_feature 1..25: note = source = /note="Description of Artificial Sequence: Synthetic oligonucleotide"
  source 1..25: mol_type = other RNA
tggttgtgaccgtctgttagactag

SEQ ID NO: 2582 - RNA, 25 nt, synthetic construct
  misc_feature 1..25: note = source = /note="Description of Artificial Sequence: Synthetic oligonucleotide"
  source 1..25: mol_type = other RNA
taatatccttggttttccatggcac

SEQ ID NO: 2583 - RNA, 25 nt, synthetic construct
  misc_feature 1..25: note = source = /note="Description of Artificial Sequence: Synthetic oligonucleotide"
  source 1..25: mol_type = other RNA
ttttgctaatatccttggttttcca

SEQ ID NO: 2584 - RNA, 25 nt, synthetic construct
  misc_feature 1..25: note = source = /note="Description of Artificial Sequence: Synthetic oligonucleotide"
  source 1..25: mol_type = other RNA
caacttctgcttttgctaatatcct

SEQ ID NO: 2585 - RNA, 25 nt, synthetic construct
  misc_feature 1..25: note = source = /note="Description of Artificial Sequence: Synthetic oligonucleotide"
  source 1..25: mol_type = other RNA
tactgtaagcagcttcggcttccca

SEQ ID NO: 2586 - RNA, 25 nt, synthetic construct
  misc_feature 1..25: note = source = /note="Description of Artificial Sequence: Synthetic oligonucleotide"
  source 1..25: mol_type = other RNA
ttgtcccagctactgtaagcagctt

SEQ ID NO: 2587 - RNA, 25 nt, synthetic construct
  misc_feature 1..25: note = source = /note="Description of Artificial Sequence: Synthetic oligonucleotide"
  source 1..25: mol_type = other RNA
agaaatcattcaggaagcttcttga

SEQ ID NO: 2588 - RNA, 25 nt, synthetic construct
  misc_feature 1..25: note = source = /note="Description of Artificial Sequence: Synthetic oligonucleotide"
  source 1..25: mol_type = other RNA
ggctcagggctagcagaaatcattc

SEQ ID NO: 2589 - RNA, 25 nt, synthetic construct
  misc_feature 1..25: note = source = /note="Description of Artificial Sequence: Synthetic oligonucleotide"
  source 1..25: mol_type = other RNA
agtgctggttccaaaaataggctca

SEQ ID NO: 2590 - RNA, 25 nt, synthetic construct
  misc_feature 1..25: note = source = /note="Description of Artificial Sequence: Synthetic oligonucleotide"
  source 1..25: mol_type = other RNA
aagtgctggttccaaaaataggctc

SEQ ID NO: 2591 - RNA, 25 nt, synthetic construct
  misc_feature 1..25: note = source = /note="Description of Artificial Sequence: Synthetic oligonucleotide"
  source 1..25: mol_type = other RNA
ttccccaagtgctggttccaaaaat

SEQ ID NO: 2592 - RNA, 25 nt, synthetic construct
  misc_feature 1..25: note = source = /note="Description of Artificial Sequence: Synthetic oligonucleotide"
  source 1..25: mol_type = other RNA
tcacaagatcagtttccccaagtgc

SEQ ID NO: 2593 - RNA, 25 nt, synthetic construct
  misc_feature 1..25: note = source = /note="Description of Artificial Sequence: Synthetic oligonucleotide"
  source 1..25: mol_type = other RNA
caagtctggggatgccccagtgggg

SEQ ID NO: 2594 - RNA, 25 nt, synthetic construct
  misc_feature 1..25: note = source = /note="Description of Artificial Sequence: Synthetic oligonucleotide"
  source 1..25: mol_type = other RNA
tcccaagtctggggatgccccagtg

SEQ ID NO: 2595 - RNA, 25 nt, synthetic construct
  misc_feature 1..25: note = source = /note="Description of Artificial Sequence: Synthetic oligonucleotide"
  source 1..25: mol_type = other RNA
ttcccaagtctggggatgccccagt

SEQ ID NO: 2596 - RNA, 25 nt, synthetic construct
  misc_feature 1..25: note = source = /note="Description of Artificial Sequence: Synthetic oligonucleotide"
  source 1..25: mol_type = other RNA
tttcccaagtctggggatgccccag

SEQ ID NO: 2597 - RNA, 25 nt, synthetic construct
  misc_feature 1..25: note = source = /note="Description of Artificial Sequence: Synthetic oligonucleotide"
  source 1..25: mol_type = other RNA
gaaagagtcacgtttcccaagtctg

SEQ ID NO: 2598 - RNA, 25 nt, synthetic construct
  misc_feature 1..25: note = source = /note="Description of Artificial Sequence: Synthetic oligonucleotide"
  source 1..25: mol_type = other RNA
agaaagagtcacgtttcccaagtct

SEQ ID NO: 2599 - RNA, 25 nt, synthetic construct
  misc_feature 1..25: note = source = /note="Description of Artificial Sequence: Synthetic oligonucleotide"
  source 1..25: mol_type = other RNA
aagaaagagtcacgtttcccaagtc

SEQ ID NO: 2600 - RNA, 25 nt, synthetic construct
  misc_feature 1..25: note = source = /note="Description of Artificial Sequence: Synthetic oligonucleotide"
  source 1..25: mol_type = other RNA
tcactgtggcctgactaaaacccag

SEQ ID NO: 2601 - RNA, 25 nt, synthetic construct
  misc_feature 1..25: note = source = /note="Description of Artificial Sequence: Synthetic oligonucleotide"
  source 1..25: mol_type = other RNA
ctgttagggctgttccttctcactg

SEQ ID NO: 2602 - RNA, 25 nt, synthetic construct
  misc_feature 1..25: note = source = /note="Description of Artificial Sequence: Synthetic oligonucleotide"
  source 1..25: mol_type = other RNA
attcaacctggctggaggcctgtta

SEQ ID NO: 2603 - RNA, 25 nt, synthetic construct
  misc_feature 1..25: note = source = /note="Description of Artificial Sequence: Synthetic oligonucleotide"
  source 1..25: mol_type = other RNA
cattcaacctggctggaggcctgtt

SEQ ID NO: 2604 - RNA, 25 nt, synthetic construct
  misc_feature 1..25: note = source = /note="Description of Artificial Sequence: Synthetic oligonucleotide"
  source 1..25: mol_type = other RNA
aaatgagctcattcaacctggctgg

SEQ ID NO: 2605 - RNA, 25 nt, synthetic construct
  misc_feature 1..25: note = source = /note="Description of Artificial Sequence: Synthetic oligonucleotide"
  source 1..25: mol_type = other RNA
caaaaatgagctcattcaacctggc

SEQ ID NO: 2606 - RNA, 25 nt, synthetic construct
  misc_feature 1..25: note = source = /note="Description of Artificial Sequence: Synthetic oligonucleotide"
  source 1..25: mol_type = other RNA
acaacaaaaatgagctcattcaacc

SEQ ID NO: 2607 - RNA, 25 nt, synthetic construct
  misc_feature 1..25: note = source = /note="Description of Artificial Sequence: Synthetic oligonucleotide"
  source 1..25: mol_type = other RNA
tagaacattagcaaatcttactggt

SEQ ID NO: 2608 - RNA, 25 nt, synthetic construct
  misc_feature 1..25: note = source = /note="Description of Artificial Sequence: Synthetic oligonucleotide"
  source 1..25: mol_type = other RNA
aatgtagaacattagcaaatcttac

SEQ ID NO: 2609 - RNA, 25 nt, synthetic construct
  misc_feature 1..25: note = source = /note="Description of Artificial Sequence: Synthetic oligonucleotide"
  source 1..25: mol_type = other RNA
aggcaaagagggatgtctttggaga

SEQ ID NO: 2610 - RNA, 25 nt, synthetic construct
  misc_feature 1..25: note = source = /note="Description of Artificial Sequence: Synthetic oligonucleotide"
  source 1..25: mol_type = other RNA
catatgaggcaaagagggatgtctt

SEQ ID NO: 2611 - RNA, 25 nt, synthetic construct
  misc_feature 1..25: note = source = /note="Description of Artificial Sequence: Synthetic oligonucleotide"
  source 1..25: mol_type = other RNA
gatgattcaacatatgaggcaaaga

SEQ ID NO: 2612 - RNA, 25 nt, synthetic construct
  misc_feature 1..25: note = source = /note="Description of Artificial Sequence: Synthetic oligonucleotide"
  source 1..25: mol_type = other RNA
ggatgattcaacatatgaggcaaag

SEQ ID NO: 2613 - RNA, 25 nt, synthetic construct
  misc_feature 1..25: note = source = /note="Description of Artificial Sequence: Synthetic oligonucleotide"
  source 1..25: mol_type = other RNA
tccgcactggatgattcaacatatg

SEQ ID NO: 2614 - RNA, 25 nt, synthetic construct
  misc_feature 1..25: note = source = /note="Description of Artificial Sequence: Synthetic oligonucleotide"
  source 1..25: mol_type = other RNA
gatattttcattgaaatatccgcac

SEQ ID NO: 2615 - RNA, 25 nt, synthetic construct
  misc_feature 1..25: note = source = /note="Description of Artificial Sequence: Synthetic oligonucleotide"
  source 1..25: mol_type = other RNA
agaatccaaggaggccacaacttca

SEQ ID NO: 2616 - RNA, 25 nt, synthetic construct
  misc_feature 1..25: note = source = /note="Description of Artificial Sequence: Synthetic oligonucleotide"
  source 1..25: mol_type = other RNA
aagccaaagtcagaagaatccaagg

SEQ ID NO: 2617 - RNA, 25 nt, synthetic construct
  misc_feature 1..25: note = source = /note="Description of Artificial Sequence: Synthetic oligonucleotide"
  source 1..25: mol_type = other RNA
cagaagccaaagtcagaagaatcca

SEQ ID NO: 2618 - RNA, 25 nt, synthetic construct
  misc_feature 1..25: note = source = /note="Description of Artificial Sequence: Synthetic oligonucleotide"
  source 1..25: mol_type = other RNA
aggaactaccaccagggctggatct

SEQ ID NO: 2619 - RNA, 25 nt, synthetic construct
  misc_feature 1..25: note = source = /note="Description of Artificial Sequence: Synthetic oligonucleotide"
  source 1..25: mol_type = other RNA
ctcagaaaggaactaccaccagggc

SEQ ID NO: 2620 - RNA, 25 nt, synthetic construct
  misc_feature 1..25: note = source = /note="Description of Artificial Sequence: Synthetic oligonucleotide"
  source 1..25: mol_type = other RNA
agacctcagaaaggaactaccacca

SEQ ID NO: 2621 - RNA, 25 nt, synthetic construct
  misc_feature 1..25: note = source = /note="Description of Artificial Sequence: Synthetic oligonucleotide"
  source 1..25: mol_type = other RNA
gagacctcagaaaggaactaccacc

SEQ ID NO: 2622 - RNA, 25 nt, synthetic construct
  misc_feature 1..25: note = source = /note="Description of Artificial Sequence: Synthetic oligonucleotide"
  source 1..25: mol_type = other RNA
ctcaagggactgagagacctcagaa

SEQ ID NO: 2623 - RNA, 25 nt, synthetic construct
  misc_feature 1..25: note = source = /note="Description of Artificial Sequence: Synthetic oligonucleotide"
  source 1..25: mol_type = other RNA
cagccaaactaccccaaagtctcaa

SEQ ID NO: 2624 - RNA, 25 nt, synthetic construct
  misc_feature 1..25: note = source = /note="Description of Artificial Sequence: Synthetic oligonucleotide"
  source 1..25: mol_type = other RNA
gcagccaaactaccccaaagtctca

SEQ ID NO: 2625 - RNA, 25 nt, synthetic construct
  misc_feature 1..25: note = source = /note="Description of Artificial Sequence: Synthetic oligonucleotide"
  source 1..25: mol_type = other RNA
ctgatatacattttgtcagtgagaa

SEQ ID NO: 2626 - RNA, 25 nt, synthetic construct
  misc_feature 1..25: note = source = /note="Description of Artificial Sequence: Synthetic oligonucleotide"
  source 1..25: mol_type = other RNA
aaggaatattggggggtggaggtgg

SEQ ID NO: 2627 - RNA, 25 nt, synthetic construct
  misc_feature 1..25: note = source = /note="Description of Artificial Sequence: Synthetic oligonucleotide"
  source 1..25: mol_type = other RNA
caaggaatattggggggtggaggtg

SEQ ID NO: 2628 - RNA, 25 nt, synthetic construct
  misc_feature 1..25: note = source = /note="Description of Artificial Sequence: Synthetic oligonucleotide"
  source 1..25: mol_type = other RNA
tcaaggaatattggggggtggaggt

SEQ ID NO: 2629 - RNA, 25 nt, synthetic construct
  misc_feature 1..25: note = source = /note="Description of Artificial Sequence: Synthetic oligonucleotide"
  source 1..25: mol_type = other RNA
ttcaaggaatattggggggtggagg

SEQ ID NO: 2630 - RNA, 25 nt, synthetic construct
  misc_feature 1..25: note = source = /note="Description of Artificial Sequence: Synthetic oligonucleotide"
  source 1..25: mol_type = other RNA
aagttcaaggaatattggggggtgg

SEQ ID NO: 2631 - RNA, 25 nt, synthetic construct
  misc_feature 1..25: note = source = /note="Description of Artificial Sequence: Synthetic oligonucleotide"
  source 1..25: mol_type = other RNA
tcaaagttcaaggaatattgggggg

SEQ ID NO: 2632 - RNA, 25 nt, synthetic construct
  misc_feature 1..25: note = source = /note="Description of Artificial Sequence: Synthetic oligonucleotide"
  source 1..25: mol_type = other RNA
aattcaaagttcaaggaatattggg

SEQ ID NO: 2633 - RNA, 25 nt, synthetic construct
  misc_feature 1..25: note = source = /note="Description of Artificial Sequence: Synthetic oligonucleotide"
  source 1..25: mol_type = other RNA
caattcaaagttcaaggaatattgg

SEQ ID NO: 2634 - RNA, 25 nt, synthetic construct
  misc_feature 1..25: note = source = /note="Description of Artificial Sequence: Synthetic oligonucleotide"
  source 1..25: mol_type = other RNA
gcaattcaaagttcaaggaatattg

SEQ ID NO: 2635 - RNA, 25 nt, synthetic construct
  misc_feature 1..25: note = source = /note="Description of Artificial Sequence: Synthetic oligonucleotide"
  source 1..25: mol_type = other RNA
agcaattcaaagttcaaggaatatt

SEQ ID NO: 2636 - RNA, 25 nt, synthetic construct
  misc_feature 1..25: note = source = /note="Description of Artificial Sequence: Synthetic oligonucleotide"
  source 1..25: mol_type = other RNA
aagcaattcaaagttcaaggaatat

SEQ ID NO: 2637 - RNA, 25 nt, synthetic construct
  misc_feature 1..25: note = source = /note="Description of Artificial Sequence: Synthetic oligonucleotide"
  source 1..25: mol_type = other RNA
gtgttctgaagcaattcaaagttca

SEQ ID NO: 2638 - RNA, 25 nt, synthetic construct
  misc_feature 1..25: note = source = /note="Description of Artificial Sequence: Synthetic oligonucleotide"
  source 1..25: mol_type = other RNA
acttccctaataagggaataccttc

SEQ ID NO: 2639 - RNA, 25 nt, synthetic construct
  misc_feature 1..25: note = source = /note="Description of Artificial Sequence: Synthetic oligonucleotide"
  source 1..25: mol_type = other RNA
gacagcagtgacacttccctaataa

SEQ ID NO: 2640 - RNA, 25 nt, synthetic construct
  misc_feature 1..25: note = source = /note="Description of Artificial Sequence: Synthetic oligonucleotide"
  source 1..25: mol_type = other RNA
agacagcagtgacacttccctaata

SEQ ID NO: 2641 - RNA, 25 nt, synthetic construct
  misc_feature 1..25: note = source = /note="Description of Artificial Sequence: Synthetic oligonucleotide"
  source 1..25: mol_type = other RNA
aagcttcttgctgcaaatactgaac

SEQ ID NO: 2642 - RNA, 25 nt, synthetic construct
  misc_feature 1..25: note = source = /note="Description of Artificial Sequence: Synthetic oligonucleotide"
  source 1..25: mol_type = other RNA
aagtcaagacaaaaccaaagcaaaa

SEQ ID NO: 2643 - RNA, 25 nt, synthetic construct
  misc_feature 1..25: note = source = /note="Description of Artificial Sequence: Synthetic oligonucleotide"
  source 1..25: mol_type = other RNA
tttgtacaatcaaactcttgtgtgc

SEQ ID NO: 2644 - RNA, 25 nt, synthetic construct
  misc_feature 1..25: note = source = /note="Description of Artificial Sequence: Synthetic oligonucleotide"
  source 1..25: mol_type = other RNA
ataaaagcaactgatcttaagcaac

SEQ ID NO: 2645 - RNA, 25 nt, synthetic construct
  misc_feature 1..25: note = source = /note="Description of Artificial Sequence: Synthetic oligonucleotide"
  source 1..25: mol_type = other RNA
tcttataacaaaactagccaagatc

SEQ ID NO: 2646 - RNA, 25 nt, synthetic construct
  misc_feature 1..25: note = source = /note="Description of Artificial Sequence: Synthetic oligonucleotide"
  source 1..25: mol_type = other RNA
catgatagtttgctgacctcgtgga

SEQ ID NO: 2647 - RNA, 25 nt, synthetic construct
  misc_feature 1..25: note = source = /note="Description of Artificial Sequence: Synthetic oligonucleotide"
  source 1..25: mol_type = other RNA
acatgatagtttgctgacctcgtgg

SEQ ID NO: 2648 - RNA, 25 nt, synthetic construct
  misc_feature 1..25: note = source = /note="Description of Artificial Sequence: Synthetic oligonucleotide"
  source 1..25: mol_type = other RNA
agaacatgatagtttgctgacctcg

SEQ ID NO: 2649 - RNA, 25 nt, synthetic construct
  misc_feature 1..25: note = source = /note="Description of Artificial Sequence: Synthetic oligonucleotide"
  source 1..25: mol_type = other RNA
ctagggactatgataactctggcct

SEQ ID NO: 2650 - RNA, 25 nt, synthetic construct
  misc_feature 1..25: note = source = /note="Description of Artificial Sequence: Synthetic oligonucleotide"
  source 1..25: mol_type = other RNA
agcaacctagggactatgataactc

SEQ ID NO: 2651 - RNA, 25 nt, synthetic construct
  misc_feature 1..25: note = source = /note="Description of Artificial Sequence: Synthetic oligonucleotide"
  source 1..25: mol_type = other RNA
gcacatgataagccgtagcaaccta

SEQ ID NO: 2652 - RNA, 25 nt, synthetic construct
  misc_feature 1..25: note = source = /note="Description of Artificial Sequence: Synthetic oligonucleotide"
  source 1..25: mol_type = other RNA
agcacatgataagccgtagcaacct

SEQ ID NO: 2653 - RNA, 25 nt, synthetic construct
  misc_feature 1..25: note = source = /note="Description of Artificial Sequence: Synthetic oligonucleotide"
  source 1..25: mol_type = other RNA
ctgacttcctcagaaaccacctctt

SEQ ID NO: 2654 - RNA, 25 nt, synthetic construct
  misc_feature 1..25: note = source = /note="Description of Artificial Sequence: Synthetic oligonucleotide"
  source 1..25: mol_type = other RNA
acccattactgactgctctggccct

SEQ ID NO: 2655 - RNA, 25 nt, synthetic construct
  misc_feature 1..25: note = source = /note="Description of Artificial Sequence: Synthetic oligonucleotide"
  source 1..25: mol_type = other RNA
cacccattactgactgctctggccc

SEQ ID NO: 2656 - RNA, 25 nt, synthetic construct
  misc_feature 1..25: note = source = /note="Description of Artificial Sequence: Synthetic oligonucleotide"
  source 1..25: mol_type = other RNA
ctcattcacccattactgactgctc

SEQ ID NO: 2657 - RNA, 25 nt, synthetic construct
  misc_feature 1..25: note = source = /note="Description of Artificial Sequence: Synthetic oligonucleotide"
  source 1..25: mol_type = other RNA
tacccaccagcaacctagaagtaga

SEQ ID NO: 2658 - RNA, 25 nt, synthetic construct
  misc_feature 1..25: note = source = /note="Description of Artificial Sequence: Synthetic oligonucleotide"
  source 1..25: mol_type = other RNA
taattttaaaatcctcagtgagcta

SEQ ID NO: 2659 - RNA, 25 nt, synthetic construct
  misc_feature 1..25: note = source = /note="Description of Artificial Sequence: Synthetic oligonucleotide"
  source 1..25: mol_type = other RNA
aaaaagttattaagactgtgaaatt

SEQ ID NO: 2660 - RNA, 25 nt, synthetic construct
  misc_feature 1..25: note = source = /note="Description of Artificial Sequence: Synthetic oligonucleotide"
  source 1..25: mol_type = other RNA
cataagtttcagaagggccacacac

SEQ ID NO: 2661 - RNA, 25 nt, synthetic construct
  misc_feature 1..25: note = source = /note="Description of Artificial Sequence: Synthetic oligonucleotide"
  source 1..25: mol_type = other RNA
ggagagatgaccataagtttcagaa

SEQ ID NO: 2662 - RNA, 25 nt, synthetic construct
  misc_feature 1..25: note = source = /note="Description of Artificial Sequence: Synthetic oligonucleotide"
  source 1..25: mol_type = other RNA
gggagagatgaccataagtttcaga

SEQ ID NO: 2663 - RNA, 25 nt, synthetic construct
  misc_feature 1..25: note = source = /note="Description of Artificial Sequence: Synthetic oligonucleotide"
  source 1..25: mol_type = other RNA
catttgaaaagaccttggtttcagt

SEQ ID NO: 2664 - RNA, 25 nt, synthetic construct
  misc_feature 1..25: note = source = /note="Description of Artificial Sequence: Synthetic oligonucleotide"
  source 1..25: mol_type = other RNA
acatttgaaaagaccttggtttcag

SEQ ID NO: 2665 - RNA, 25 nt, synthetic construct
  misc_feature 1..25: note = source = /note="Description of Artificial Sequence: Synthetic oligonucleotide"
  source 1..25: mol_type = other RNA
catttagccacatttgaaaagacct

SEQ ID NO: 2666 - RNA, 25 nt, synthetic construct
  misc_feature 1..25: note = source = /note="Description of Artificial Sequence: Synthetic oligonucleotide"
  source 1..25: mol_type = other RNA
tcctggctgtttccccgaagcaact

SEQ ID NO: 2667 - RNA, 25 nt, synthetic construct
  misc_feature 1..25: note = source = /note="Description of Artificial Sequence: Synthetic oligonucleotide"
  source 1..25: mol_type = other RNA
ctaaaaataatcttgaccattttcc

SEQ ID NO: 2668 - RNA, 25 nt, synthetic construct
  misc_feature 1..25: note = source = /note="Description of Artificial Sequence: Synthetic oligonucleotide"
  source 1..25: mol_type = other RNA
atgtctatagtctaagtttccctta

SEQ ID NO: 2669 - RNA, 25 nt, synthetic construct
  misc_feature 1..25: note = source = /note="Description of Artificial Sequence: Synthetic oligonucleotide"
  source 1..25: mol_type = other RNA
aacatacagaaaacaaaagctgcac

SEQ ID NO: 2670 - RNA, 25 nt, synthetic construct
  misc_feature 1..25: note = source = /note="Description of Artificial Sequence: Synthetic oligonucleotide"
  source 1..25: mol_type = other RNA
taacaaaggcatcctgacatcaggg

SEQ ID NO: 2671 - RNA, 25 nt, synthetic construct
  misc_feature 1..25: note = source = /note="Description of Artificial Sequence: Synthetic oligonucleotide"
  source 1..25: mol_type = other RNA
tcctaacaaaggcatcctgacatca

SEQ ID NO: 2672 - RNA, 25 nt, synthetic construct
  misc_feature 1..25: note = source = /note="Description of Artificial Sequence: Synthetic oligonucleotide"
  source 1..25: mol_type = other RNA
atcctaacaaaggcatcctgacatc

SEQ ID NO: 2673 - RNA, 25 nt, synthetic construct
  misc_feature 1..25: note = source = /note="Description of Artificial Sequence: Synthetic oligonucleotide"
  source 1..25: mol_type = other RNA
taagggcaaatacagatcctaacaa

SEQ ID NO: 2674 - RNA, 25 nt, synthetic construct
  misc_feature 1..25: note = source = /note="Description of Artificial Sequence: Synthetic oligonucleotide"
  source 1..25: mol_type = other RNA
ggaaaaaagatttcaacaaaattaa

SEQ ID NO: 2675 - RNA, 25 nt, synthetic construct
  misc_feature 1..25: note = source = /note="Description of Artificial Sequence: Synthetic oligonucleotide"
  source 1..25: mol_type = other RNA
aggaaaaaagatttcaacaaaatta

SEQ ID NO: 2676 - RNA, 25 nt, synthetic construct
  misc_feature 1..25: note = source = /note="Description of Artificial Sequence: Synthetic oligonucleotide"
  source 1..25: mol_type = other RNA
attttggaacttttcaagaggaaga

SEQ ID NO: 2677 - RNA, 25 nt, synthetic construct
  misc_feature 1..25: note = source = /note="Description of Artificial Sequence: Synthetic oligonucleotide"
  source 1..25: mol_type = other RNA
aaactatattttggaacttttcaag

SEQ ID NO: 2678 - RNA, 25 nt, synthetic construct
  misc_feature 1..25: note = source = /note="Description of Artificial Sequence: Synthetic oligonucleotide"
  source 1..25: mol_type = other RNA
atgaaagatacaataaactatattt

SEQ ID NO: 2679 - RNA, 25 nt, synthetic construct
  misc_feature 1..25: note = source = /note="Description of Artificial Sequence: Synthetic oligonucleotide"
  source 1..25: mol_type = other RNA
ttgtgtgaactgcccatagtgaaaa

SEQ ID NO: 2680 - RNA, 25 nt, synthetic construct
  misc_feature 1..25: note = source = /note="Description of Artificial Sequence: Synthetic oligonucleotide"
  source 1..25: mol_type = other RNA
ttattaattacatgatttgaggctt

SEQ ID NO: 2681 - RNA, 25 nt, synthetic construct
  misc_feature 1..25: note = source = /note="Description of Artificial Sequence: Synthetic oligonucleotide"
  source 1..25: mol_type = other RNA
ggcaaattattaattacatgatttg

SEQ ID NO: 2682 - RNA, 25 nt, synthetic construct
  misc_feature 1..25: note = source = /note="Description of Artificial Sequence: Synthetic oligonucleotide"
  source 1..25: mol_type = other RNA
aatcacaattaggtcataaataaac

SEQ ID NO: 2683 - RNA, 25 nt, synthetic construct
  misc_feature 1..25: note = source = /note="Description of Artificial Sequence: Synthetic oligonucleotide"
  source 1..25: mol_type = other RNA
ttttattaataaaagaatcacaatt

SEQ ID NO: 2684 - RNA, 25 nt, synthetic construct
  misc_feature 1..25: note = source = /note="Description of Artificial Sequence: Synthetic oligonucleotide"
  source 1..25: mol_type = other RNA
gtaggtctagtcatcagcttaatca

SEQ ID NO: 2685 - RNA, 25 nt, synthetic construct
  misc_feature 1..25: note = source = /note="Description of Artificial Sequence: Synthetic oligonucleotide"
  source 1..25: mol_type = other RNA
tgtaggtctagtcatcagcttaatc

SEQ ID NO: 2686 - RNA, 25 nt, synthetic construct
  misc_feature 1..25: note = source = /note="Description of Artificial Sequence: Synthetic oligonucleotide"
  source 1..25: mol_type = other RNA
catatactgcaggaaaattaattgt

SEQ ID NO: 2687 - RNA, 25 nt, synthetic construct
  misc_feature 1..25: note = source = /note="Description of Artificial Sequence: Synthetic oligonucleotide"
  source 1..25: mol_type = other RNA
tctggtacaatacttcatatactgc

SEQ ID NO: 2688 - RNA, 25 nt, synthetic construct
  misc_feature 1..25: note = source = /note="Description of Artificial Sequence: Synthetic oligonucleotide"
  source 1..25: mol_type = other RNA
aaatattacatatcttttaatactc

SEQ ID NO: 2689 - RNA, 25 nt, synthetic construct
  misc_feature 1..25: note = source = /note="Description of Artificial Sequence: Synthetic oligonucleotide"
  source 1..25: mol_type = other RNA
acatcctaaaacgtattccttttaa

SEQ ID NO: 2690 - RNA, 25 nt, synthetic construct
  misc_feature 1..25: note = source = /note="Description of Artificial Sequence: Synthetic oligonucleotide"
  source 1..25: mol_type = other RNA
gactacataatatacgtgggcaaaa

SEQ ID NO: 2691 - RNA, 25 nt, synthetic construct
  misc_feature 1..25: note = source = /note="Description of Artificial Sequence: Synthetic oligonucleotide"
  source 1..25: mol_type = other RNA
tgcaaatagactacataatatacgt

SEQ ID NO: 2692 - RNA, 25 nt, synthetic construct
  misc_feature 1..25: note = source = /note="Description of Artificial Sequence: Synthetic oligonucleotide"
  source 1..25: mol_type = other RNA
ttgcaaatagactacataatatacg

SEQ ID NO: 2693 - RNA, 25 nt, synthetic construct
  misc_feature 1..25: note = source = /note="Description of Artificial Sequence: Synthetic oligonucleotide"
  source 1..25: mol_type = other RNA
gcgctaacacccataaatataggtg

SEQ ID NO: 2694 - RNA, 25 nt, synthetic construct
  misc_feature 1..25: note = source = /note="Description of Artificial Sequence: Synthetic oligonucleotide"
  source 1..25: mol_type = other RNA
tgcgctaacacccataaatataggt

SEQ ID NO: 2695 - RNA, 25 nt, synthetic construct
  misc_feature 1..25: note = source = /note="Description of Artificial Sequence: Synthetic oligonucleotide"
  source 1..25: mol_type = other RNA
ttgcgctaacacccataaatatagg

SEQ ID NO: 2696 - RNA, 25 nt, synthetic construct
  misc_feature 1..25: note = source = /note="Description of Artificial Sequence: Synthetic oligonucleotide"
  source 1..25: mol_type = other RNA
cagttgcgctaacacccataaatat

SEQ ID NO: 2697 - RNA, 25 nt, synthetic construct
  misc_feature 1..25: note = source = /note="Description of Artificial Sequence: Synthetic oligonucleotide"
  source 1..25: mol_type = other RNA
cgacaaatgccatcatataagaaaa

SEQ ID NO: 2698 - DNA, 25 bp, Homo sapiens
  source 1..25: mol_type = other DNA
gcgcgcagctcacacctggcggccg

SEQ ID NO: 2699 - DNA, 25 bp, Homo sapiens
  source 1..25: mol_type = other DNA
ctcacacctggcggccgcggtttcc

SEQ ID NO: 2700 - DNA, 25 bp, Homo sapiens
  source 1..25: mol_type = other DNA
acacctggcggccgcggtttccagg

SEQ ID NO: 2701 - DNA, 25 bp, Homo sapiens
  source 1..25: mol_type = other DNA
cggccgcggtttccaggaggaagca

SEQ ID NO: 2702 - DNA, 25 bp, Homo sapiens
  source 1..25: mol_type = other DNA
tttccaggaggaagcaaggatgctt

SEQ ID NO: 2703 - DNA, 25 bp, Homo sapiens
  source 1..25: mol_type = other DNA
gcaaggatgctttggacactgtgcg

SEQ ID NO: 2704 - DNA, 25 bp, Homo sapiens
  source 1..25: mol_type = other DNA
ttggacactgtgcgtggcgcctccg

SEQ ID NO: 2705 - DNA, 25 bp, Homo sapiens
  source 1..25: mol_type = other DNA
cgcggagcccccgcgctgccattcc

SEQ ID NO: 2706 - DNA, 25 bp, Homo sapiens
  source 1..25: mol_type = other DNA
cgcgctgccattcccggccgtcgct

SEQ ID NO: 2707 - DNA, 25 bp, Homo sapiens
  source 1..25: mol_type = other DNA
cggccgtcgctcggtcctccgctga

SEQ ID NO: 2708 - DNA, 25 bp, Homo sapiens
  source 1..25: mol_type = other DNA
ggccgtcgctcggtcctccgctgac

SEQ ID NO: 2709 - DNA, 25 bp, Homo sapiens
  source 1..25: mol_type = other DNA
gctcggtcctccgctgacgggaagc

SEQ ID NO: 2710 - DNA, 25 bp, Homo sapiens
  source 1..25: mol_type = other DNA
tcctccgctgacgggaagcaggaag

SEQ ID NO: 2711 - DNA, 25 bp, Homo sapiens
  source 1..25: mol_type = other DNA
tccgctgacgggaagcaggaagtgg

SEQ ID NO: 2712 - DNA, 25 bp, Homo sapiens
  source 1..25: mol_type = other DNA
gctgacgggaagcaggaagtggcgg

SEQ ID NO: 2713 - DNA, 25 bp, Homo sapiens
  source 1..25: mol_type = other DNA
ctgacgggaagcaggaagtggcggc

SEQ ID NO: 2714 - DNA, 25 bp, Homo sapiens
  source 1..25: mol_type = other DNA
aggaagtggcggcgggcgtcgcgag

SEQ ID NO: 2715 - DNA, 25 bp, Homo sapiens
  source 1..25: mol_type = other DNA
gcgggcgtcgcgagcggtgacatca

SEQ ID NO: 2716 - DNA, 25 bp, Homo sapiens
  source 1..25: mol_type = other DNA
cgggcgtcgcgagcggtgacatcac

SEQ ID NO: 2717 - DNA, 25 bp, Homo sapiens
  source 1..25: mol_type = other DNA
gggcgtcgcgagcggtgacatcacg

SEQ ID NO: 2718 - DNA, 25 bp, Homo sapiens
  source 1..25: mol_type = other DNA
ggcgtcgcgagcggtgacatcacgg

SEQ ID NO: 2719 - DNA, 25 bp, Homo sapiens
  source 1..25: mol_type = other DNA
gcgagcggtgacatcacgggggcga

SEQ ID NO: 2720 - DNA, 25 bp, Homo sapiens
  source 1..25: mol_type = other DNA
agcggtgacatcacgggggcgacgg

SEQ ID NO: 2721 - DNA, 25 bp, Homo sapiens
  source 1..25: mol_type = other DNA
gacatcacgggggcgacggcggcga

SEQ ID NO: 2722 - DNA, 25 bp, Homo sapiens
  source 1..25: mol_type = other DNA
acatcacgggggcgacggcggcgaa

SEQ ID NO: 2723 - DNA, 25 bp, Homo sapiens
  source 1..25: mol_type = other DNA
tcacgggggcgacggcggcgaaggg

SEQ ID NO: 2724 - DNA, 25 bp, Homo sapiens
  source 1..25: mol_type = other DNA
cacgggggcgacggcggcgaagggc

SEQ ID NO: 2725 - DNA, 25 bp, Homo sapiens
  source 1..25: mol_type = other DNA
acgggggcgacggcggcgaagggcg

SEQ ID NO: 2726 - DNA, 25 bp, Homo sapiens
  source 1..25: mol_type = other DNA
cgggggcgacggcggcgaagggcgg

SEQ ID NO: 2727 - DNA, 25 bp, Homo sapiens
  source 1..25: mol_type = other DNA
gggcgacggcggcgaagggcggggg

SEQ ID NO: 2728 - DNA, 25 bp, Homo sapiens
  source 1..25: mol_type = other DNA
cgacggcggcgaagggcgggggcgg

SEQ ID NO: 2729 - DNA, 25 bp, Homo sapiens
  source 1..25: mol_type = other DNA
cggcggcgaagggcgggggcggagg

SEQ ID NO: 2730 - DNA, 25 bp, Homo sapiens
  source 1..25: mol_type = other DNA
gggcgggggcggaggaggagcgagc

SEQ ID NO: 2731 - DNA, 25 bp, Homo sapiens
  source 1..25: mol_type = other DNA
ggcgggggcggaggaggagcgagcc

SEQ ID NO: 2732 - DNA, 25 bp, Homo sapiens
  source 1..25: mol_type = other DNA
ggggcggaggaggagcgagccgggc

SEQ ID NO: 2733 - DNA, 25 bp, Homo sapiens
  source 1..25: mol_type = other DNA
gggcggaggaggagcgagccgggcc

SEQ ID NO: 2734 - DNA, 25 bp, Homo sapiens
  source 1..25: mol_type = other DNA
ggcggaggaggagcgagccgggccg

SEQ ID NO: 2735 - DNA, 25 bp, Homo sapiens
  source 1..25: mol_type = other DNA
gcggaggaggagcgagccgggccgg

SEQ ID NO: 2736 - DNA, 25 bp, Homo sapiens
  source 1..25: mol_type = other DNA
cggaggaggagcgagccgggccggg

SEQ ID NO: 2737 - DNA, 25 bp, Homo sapiens
  source 1..25: mol_type = other DNA
ggccggggggcagctgcacagtctc

SEQ ID NO: 2738 - DNA, 25 bp, Homo sapiens
  source 1..25: mol_type = other DNA
gccggggggcagctgcacagtctcc

SEQ ID NO: 2739 - DNA, 25 bp, Homo sapiens
  source 1..25: mol_type = other DNA
cagctgcacagtctccgggatcccc

SEQ ID NO: 2740 - DNA, 25 bp, Homo sapiens
  source 1..25: mol_type = other DNA
gcacagtctccgggatccccaggcc

SEQ ID NO: 2741 - DNA, 25 bp, Homo sapiens
  source 1..25: mol_type = other DNA
cagtctccgggatccccaggcctgg

SEQ ID NO: 2742 - DNA, 25 bp, Homo sapiens
  source 1..25: mol_type = other DNA
agtctccgggatccccaggcctgga

SEQ ID NO: 2743 - DNA, 25 bp, Homo sapiens
  source 1..25: mol_type = other DNA
gtctccgggatccccaggcctggag

SEQ ID NO: 2744 - DNA, 25 bp, Homo sapiens
  source 1..25: mol_type = other DNA
tctccgggatccccaggcctggagg

SEQ ID NO: 2745 - DNA, 25 bp, Homo sapiens
  source 1..25: mol_type = other DNA
ctccgggatccccaggcctggaggg

SEQ ID NO: 2746 - DNA, 25 bp, Homo sapiens
  source 1..25: mol_type = other DNA
ccaggcctggaggggggtctgtgcg

SEQ ID NO: 2747 - DNA, 25 bp, Homo sapiens
  source 1..25: mol_type = other DNA
gcctggaggggggtctgtgcgcggc

SEQ ID NO: 2748 - DNA, 25 bp, Homo sapiens
  source 1..25: mol_type = other DNA
ggaggggggtctgtgcgcggccggc

SEQ ID NO: 2749 - DNA, 25 bp, Homo sapiens
  source 1..25: mol_type = other DNA
cggccggctggctctgccccgcgtc

SEQ ID NO: 2750 - DNA, 25 bp, Homo sapiens
  source 1..25: mol_type = other DNA
gctctgccccgcgtccggtcccgag

SEQ ID NO: 2751 - DNA, 25 bp, Homo sapiens
  source 1..25: mol_type = other DNA
ctctgccccgcgtccggtcccgagc

SEQ ID NO: 2752 - DNA, 25 bp, Homo sapiens
  source 1..25: mol_type = other DNA
cgtccggtcccgagcgggcctccct

SEQ ID NO: 2753 - DNA, 25 bp, Homo sapiens
  source 1..25: mol_type = other DNA
gtccggtcccgagcgggcctccctc

SEQ ID NO: 2754 - DNA, 25 bp, Homo sapiens
  source 1..25: mol_type = other DNA
gccagcccgatgtgaccgagcccag

SEQ ID NO: 2755 - DNA, 25 bp, Homo sapiens
  source 1..25: mol_type = other DNA
gaccgagcccagcggagcctgagca

SEQ ID NO: 2756 - DNA, 25 bp, Homo sapiens
  source 1..25: mol_type = other DNA
agcccagcggagcctgagcaaggag

SEQ ID NO: 2757 - DNA, 25 bp, Homo sapiens
  source 1..25: mol_type = other DNA
gcccagcggagcctgagcaaggagc

SEQ ID NO: 2758 - DNA, 25 bp, Homo sapiens
  source 1..25: mol_type = other DNA
gcctgagcaaggagcgggtccgtcg

SEQ ID NO: 2759 - DNA, 25 bp, Homo sapiens
  source 1..25: mol_type = other DNA
gcaaggagcgggtccgtcgcggagc

SEQ ID NO: 2760 - DNA, 25 bp, Homo sapiens
  source 1..25: mol_type = other DNA
aggagcgggtccgtcgcggagccgg

SEQ ID NO: 2761 - DNA, 25 bp, Homo sapiens
  source 1..25: mol_type = other DNA
ggagcgggtccgtcgcggagccgga

SEQ ID NO: 2762 - DNA, 25 bp, Homo sapiens
  source 1..25: mol_type = other DNA
gcgggtccgtcgcggagccggaggg

SEQ ID NO: 2763 - DNA, 25 bp, Homo sapiens
  source 1..25: mol_type = other DNA
cgggtccgtcgcggagccggagggc

SEQ ID NO: 2764 - DNA, 25 bp, Homo sapiens
  source 1..25: mol_type = other DNA
gtccgtcgcggagccggagggcggg

SEQ ID NO: 2765 - DNA, 25 bp, Homo sapiens
  source 1..25: mol_type = other DNA
ggagggcgggaggaacatgacatcg

SEQ ID NO: 2766 - DNA, 25 bp, Homo sapiens
  source 1..25: mol_type = other DNA
gggcgggaggaacatgacatcgcgg

SEQ ID NO: 2767 - DNA, 25 bp, Homo sapiens
  source 1..25: mol_type = other DNA
ggaggaacatgacatcgcggaggtg

SEQ ID NO: 2768 - DNA, 25 bp, Homo sapiens
  source 1..25: mol_type = other DNA
gacatcgcggaggtgaggagccccg

SEQ ID NO: 2769 - DNA, 25 bp, Homo sapiens
  source 1..25: mol_type = other DNA
acatcgcggaggtgaggagccccga

SEQ ID NO: 2770 - DNA, 25 bp, Homo sapiens
  source 1..25: mol_type = other DNA
catcgcggaggtgaggagccccgag

SEQ ID NO: 2771 - DNA, 25 bp, Homo sapiens
  source 1..25: mol_type = other DNA
cttcctcctggaaaccgcggccgcc

SEQ ID NO: 2772 - DNA, 25 bp, Homo sapiens
  source 1..25: mol_type = other DNA
catccttgcttcctcctggaaaccg

SEQ ID NO: 2773 - DNA, 25 bp, Homo sapiens
  source 1..25: mol_type = other DNA
tgtccaaagcatccttgcttcctcc

SEQ ID NO: 2774 - DNA, 25 bp, Homo sapiens
  source 1..25: mol_type = other DNA
gaatggcagcgcgggggctccgcgg

SEQ ID NO: 2775 - DNA, 25 bp, Homo sapiens
  source 1..25: mol_type = other DNA
cgggaatggcagcgcgggggctccg

SEQ ID NO: 2776 - DNA, 25 bp, Homo sapiens
  source 1..25: mol_type = other DNA
gcgacggccgggaatggcagcgcgg

SEQ ID NO: 2777 - DNA, 25 bp, Homo sapiens
  source 1..25: mol_type = other DNA
agcgacggccgggaatggcagcgcg

SEQ ID NO: 2778 - DNA, 25 bp, Homo sapiens
  source 1..25: mol_type = other DNA
gagcgacggccgggaatggcagcgc

SEQ ID NO: 2779 - DNA, 25 bp, Homo sapiens
  source 1..25: mol_type = other DNA
cgagcgacggccgggaatggcagcg

SEQ ID NO: 2780 - DNA, 25 bp, Homo sapiens
  source 1..25: mol_type = other DNA
cggaggaccgagcgacggccgggaa

SEQ ID NO: 2781 - DNA, 25 bp, Homo sapiens
  source 1..25: mol_type = other DNA
gtcagcggaggaccgagcgacggcc

SEQ ID NO: 2782 - DNA, 25 bp, Homo sapiens
  source 1..25: mol_type = other DNA
cgtcagcggaggaccgagcgacggc

SEQ ID NO: 2783 - DNA, 25 bp, Homo sapiens
  source 1..25: mol_type = other DNA
ttcccgtcagcggaggaccgagcga

SEQ ID NO: 2784 - DNA, 25 bp, Homo sapiens
  source 1..25: mol_type = other DNA
cggacttcctgcttcccgtcagcgg

SEQ ID NO: 2785 - DNA, 25 bp, Homo sapiens
  source 1..25: mol_type = other DNA
cggcggacttcctgcttcccgtcag

SEQ ID NO: 2786 - DNA, 25 bp, Homo sapiens
  source 1..25: mol_type = other DNA
gagactgtgcagctgcgggggccgg

SEQ ID NO: 2787 - DNA, 25 bp, Homo sapiens
  source 1..25: mol_type = other DNA
tcccggagactgtgcagctgcgggg

SEQ ID NO: 2788 - DNA, 25 bp, Homo sapiens
  source 1..25: mol_type = other DNA
gacccccctccaggcctggggatcc

SEQ ID NO: 2789 - DNA, 25 bp, Homo sapiens
  source 1..25: mol_type = other DNA
gcgcacagacccccctccaggcctg

SEQ ID NO: 2790 - DNA, 25 bp, Homo sapiens
  source 1..25: mol_type = other DNA
cgcgcacagacccccctccaggcct

SEQ ID NO: 2791 - DNA, 25 bp, Homo sapiens
  source 1..25: mol_type = other DNA
ccgcgcacagacccccctccaggcc

SEQ ID NO: 2792 - DNA, 25 bp, Homo sapiens
  source 1..25: mol_type = other DNA
gccggccgcgcacagacccccctcc

SEQ ID NO: 2793 - DNA, 25 bp, Homo sapiens
  source 1..25: mol_type = other DNA
ggaccggacgcggggcagagccagc

SEQ ID NO: 2794 - DNA, 25 bp, Homo sapiens
  source 1..25: mol_type = other DNA
ggaggcccgctcgggaccggacgcg

SEQ ID NO: 2795 - DNA, 25 bp, Homo sapiens
  source 1..25: mol_type = other DNA
gggaggcccgctcgggaccggacgc

SEQ ID NO: 2796 - DNA, 25 bp, Homo sapiens
  source 1..25: mol_type = other DNA
agggaggcccgctcgggaccggacg

SEQ ID NO: 2797 - DNA, 25 bp, Homo sapiens
  source 1..25: mol_type = other DNA
ggcccgagggaggcccgctcgggac

SEQ ID NO: 2798 - DNA, 25 bp, Homo sapiens
  source 1..25: mol_type = other DNA
gggctggcccgagggaggcccgctc

SEQ ID NO: 2799 - DNA, 25 bp, Homo sapiens
  source 1..25: mol_type = other DNA
cgggctggcccgagggaggcccgct

SEQ ID NO: 2800 - DNA, 25 bp, Homo sapiens
  source 1..25: mol_type = other DNA
cggtcacatcgggctggcccgaggg

SEQ ID NO: 2801 - DNA, 25 bp, Homo sapiens
  source 1..25: mol_type = other DNA
gctcggtcacatcgggctggcccga

SEQ ID NO: 2802 - DNA, 25 bp, Homo sapiens
  source 1..25: mol_type = other DNA
ggctcggtcacatcgggctggcccg

SEQ ID NO: 2803 - DNA, 25 bp, Homo sapiens
  source 1..25: mol_type = other DNA
tccgctgggctcggtcacatcgggc

SEQ ID NO: 2804 - DNA, 25 bp, Homo sapiens
  source 1..25: mol_type = other DNA
aggctccgctgggctcggtcacatc

SEQ ID NO: 2805 - DNA, 25 bp, Homo sapiens
  source 1..25: mol_type = other DNA
caggctccgctgggctcggtcacat

SEQ ID NO: 2806 - DNA, 25 bp, Homo sapiens
  source 1..25: mol_type = other DNA
ctccttgctcaggctccgctgggct

SEQ ID NO: 2807 - DNA, 25 bp, Homo sapiens
  source 1..25: mol_type = other DNA
acccgctccttgctcaggctccgct

SEQ ID NO: 2808 - DNA, 25 bp, Homo sapiens
  source 1..25: mol_type = other DNA
gacccgctccttgctcaggctccgc

SEQ ID NO: 2809 - DNA, 25 bp, Homo sapiens
  source 1..25: mol_type = other DNA
tccgcgacggacccgctccttgctc

SEQ ID NO: 2810 - DNA, 25 bp, Homo sapiens
  source 1..25: mol_type = other DNA
ttcctcccgccctccggctccgcga

SEQ ID NO: 2811 - DNA, 25 bp, Homo sapiens
  source 1..25: mol_type = other DNA
gcgatgtcatgttcctcccgccctc

SEQ ID NO: 2812 - DNA, 25 bp, Homo sapiens
  source 1..25: mol_type = other DNA
taagatggtttcacccaaatatcac

SEQ ID NO: 2813 - DNA, 25 bp, Homo sapiens
  source 1..25: mol_type = other DNA
tggtttcacccaaatatcactggtg

SEQ ID NO: 2814 - DNA, 25 bp, Homo sapiens
  source 1..25: mol_type = other DNA
tttcacccaaatatcactggtgtgg

SEQ ID NO: 2815 - DNA, 25 bp, Homo sapiens
  source 1..25: mol_type = other DNA
aggcagaaaacctactgttgacaag

SEQ ID NO: 2816 - DNA, 25 bp, Homo sapiens
  source 1..25: mol_type = other DNA
acctactgttgacaagaggagttga

SEQ ID NO: 2817 - DNA, 25 bp, Homo sapiens
  source 1..25: mol_type = other DNA
acaagaggagttgatggcagttttt

SEQ ID NO: 2818 - DNA, 25 bp, Homo sapiens
  source 1..25: mol_type = other DNA
aggagttgatggcagttttttggca

SEQ ID NO: 2819 - DNA, 25 bp, Homo sapiens
  source 1..25: mol_type = other DNA
tggcaaggcctagtaaaagtaaccc

SEQ ID NO: 2820 - DNA, 25 bp, Homo sapiens
  source 1..25: mol_type = other DNA
ccctggagacttcacactttccgtt

SEQ ID NO: 2821 - DNA, 25 bp, Homo sapiens
  source 1..25: mol_type = other DNA
acttcacactttccgttaggtaagt

SEQ ID NO: 2822 - DNA, 25 bp, Homo sapiens
  source 1..25: mol_type = other DNA
ttctgcctccacaccagtgatattt

SEQ ID NO: 2823 - DNA, 25 bp, Homo sapiens
  source 1..25: mol_type = other DNA
tttctgcctccacaccagtgatatt

SEQ ID NO: 2824 - DNA, 25 bp, Homo sapiens
  source 1..25: mol_type = other DNA
gccatcaactcctcttgtcaacagt

SEQ ID NO: 2825 - DNA, 25 bp, Homo sapiens
  source 1..25: mol_type = other DNA
tgaagtctccagggttacttttact

SEQ ID NO: 2826 - DNA, 25 bp, Homo sapiens
  source 1..25: mol_type = other DNA
cctaacggaaagtgtgaagtctcca

SEQ ID NO: 2827 - DNA, 25 bp, Homo sapiens
  source 1..25: mol_type = other DNA
acctaacggaaagtgtgaagtctcc

SEQ ID NO: 2828 - DNA, 25 bp, Homo sapiens
  source 1..25: mol_type = other DNA
ttccaatggactattttagaagaaa

SEQ ID NO: 2829 - DNA, 25 bp, Homo sapiens
  source 1..25: mol_type = other DNA
tcacccacatcaagattcagaacac

SEQ ID NO: 2830 - DNA, 25 bp, Homo sapiens
  source 1..25: mol_type = other DNA
acactggtgattactatgacctgta

SEQ ID NO: 2831 - DNA, 25 bp, Homo sapiens
  source 1..25: mol_type = other DNA
ctggtgattactatgacctgtatgg

SEQ ID NO: 2832 - DNA, 25 bp, Homo sapiens
  source 1..25: mol_type = other DNA
tggtgattactatgacctgtatgga

SEQ ID NO: 2833 - DNA, 25 bp, Homo sapiens
  source 1..25: mol_type = other DNA
ggtgattactatgacctgtatggag

SEQ ID NO: 2834 - DNA, 25 bp, Homo sapiens
  source 1..25: mol_type = other DNA
tatggaggggagaaatttgccactt

SEQ ID NO: 2835 - DNA, 25 bp, Homo sapiens
  source 1..25: mol_type = other DNA
gagaaatttgccactttggctgagt

SEQ ID NO: 2836 - DNA, 25 bp, Homo sapiens
  source 1..25: mol_type = other DNA
ttggctgagttggtccagtattaca

SEQ ID NO: 2837 - DNA, 25 bp, Homo sapiens
  source 1..25: mol_type = other DNA
tggtccagtattacatggaacatca

SEQ ID NO: 2838 - DNA, 25 bp, Homo sapiens
  source 1..25: mol_type = other DNA
ggtccagtattacatggaacatcac

SEQ ID NO: 2839 - DNA, 25 bp, Homo sapiens
  source 1..25: mol_type = other DNA
atcacgggcaattaaaagagaagaa

SEQ ID NO: 2840 - DNA, 25 bp, Homo sapiens
  source 1..25: mol_type = other DNA
gaactgtgcagatcctacctctgaa

SEQ ID NO: 2841 - DNA, 25 bp, Homo sapiens
  source 1..25: mol_type = other DNA
ctccatttcttctaaaatagtccat

SEQ ID NO: 2842 - DNA, 25 bp, Homo sapiens
  source 1..25: mol_type = other DNA
tcaccagtgttctgaatcttgatgt

SEQ ID NO: 2843 - DNA, 25 bp, Homo sapiens
  source 1..25: mol_type = other DNA
atcaccagtgttctgaatcttgatg

SEQ ID NO: 2844 - DNA, 25 bp, Homo sapiens
  source 1..25: mol_type = other DNA
agtggcaaatttctcccctccatac

SEQ ID NO: 2845 - DNA, 25 bp, Homo sapiens
  source 1..25: mol_type = other DNA
taatactggaccaactcagccaaag

SEQ ID NO: 2846 - DNA, 25 bp, Homo sapiens
  source 1..25: mol_type = other DNA
ttgcccgtgatgttccatgtaatac

SEQ ID NO: 2847 - DNA, 25 bp, Homo sapiens
  source 1..25: mol_type = other DNA
cagaggtaggatctgcacagttcag

SEQ ID NO: 2848 - DNA, 25 bp, Homo sapiens
  source 1..25: mol_type = other DNA
aaaatgttactgacctttcagaggt

SEQ ID NO: 2849 - DNA, 25 bp, Homo sapiens
  source 1..25: mol_type = other DNA
cactaaaatgttactgacctttcag

SEQ ID NO: 2850 - DNA, 25 bp, Homo sapiens
  source 1..25: mol_type = other DNA
tttttaaaaactttaggtggtttca

SEQ ID NO: 2851 - DNA, 25 bp, Homo sapiens
  source 1..25: mol_type = other DNA
ttaggtggtttcatggacatctctc

SEQ ID NO: 2852 - DNA, 25 bp, Homo sapiens
  source 1..25: mol_type = other DNA
taggtggtttcatggacatctctct

SEQ ID NO: 2853 - DNA, 25 bp, Homo sapiens
  source 1..25: mol_type = other DNA
aagcagagaaattattaactgaaaa

SEQ ID NO: 2854 - DNA, 25 bp, Homo sapiens
  source 1..25: mol_type = other DNA
aattattaactgaaaaaggaaaaca

SEQ ID NO: 2855 - DNA, 25 bp, Homo sapiens
  source 1..25: mol_type = other DNA
ttgtacgagagagccagagccaccc

SEQ ID NO: 2856 - DNA, 25 bp, Homo sapiens
  source 1..25: mol_type = other DNA
gagattttgttctttctgtgcgcac

SEQ ID NO: 2857 - DNA, 25 bp, Homo sapiens
  source 1..25: mol_type = other DNA
tttctgtgcgcactggtgatgacaa

SEQ ID NO: 2858 - DNA, 25 bp, Homo sapiens
  source 1..25: mol_type = other DNA
ttctgtgcgcactggtgatgacaaa

SEQ ID NO: 2859 - DNA, 25 bp, Homo sapiens
  source 1..25: mol_type = other DNA
tctgtgcgcactggtgatgacaaag

SEQ ID NO: 2860 - DNA, 25 bp, Homo sapiens
  source 1..25: mol_type = other DNA
gtgatgacaaaggggagagcaatga

SEQ ID NO: 2861 - DNA, 25 bp, Homo sapiens
  source 1..25: mol_type = other DNA
gtgacccatgttatgattcgctgtc

SEQ ID NO: 2862 - DNA, 25 bp, Homo sapiens
  source 1..25: mol_type = other DNA
aagaacaaaatctccagggtggctc

SEQ ID NO: 2863 - DNA, 25 bp, Homo sapiens
  source 1..25: mol_type = other DNA
cacagaaagaacaaaatctccaggg

SEQ ID NO: 2864 - DNA, 25 bp, Homo sapiens
  source 1..25: mol_type = other DNA
gcgcacagaaagaacaaaatctcca

SEQ ID NO: 2865 - DNA, 25 bp, Homo sapiens
  source 1..25: mol_type = other DNA
tgcgcacagaaagaacaaaatctcc

SEQ ID NO: 2866 - DNA, 25 bp, Homo sapiens
  source 1..25: mol_type = other DNA
tttacctgacagcgaatcataacat

SEQ ID NO: 2867 - DNA, 25 bp, Homo sapiens
  source 1..25: mol_type = other DNA
atttacctgacagcgaatcataaca

SEQ ID NO: 2868 - DNA, 25 bp, Homo sapiens
  source 1..25: mol_type = other DNA
cttgaaaggaactgaaatacgacgt

SEQ ID NO: 2869 - DNA, 25 bp, Homo sapiens
  source 1..25: mol_type = other DNA
gaaaggaactgaaatacgacgttgg

SEQ ID NO: 2870 - DNA, 25 bp, Homo sapiens
  source 1..25: mol_type = other DNA
aggaactgaaatacgacgttggtgg

SEQ ID NO: 2871 - DNA, 25 bp, Homo sapiens
  source 1..25: mol_type = other DNA
gaaatacgacgttggtggaggagaa

SEQ ID NO: 2872 - DNA, 25 bp, Homo sapiens
  source 1..25: mol_type = other DNA
cggtttgattctttgacagatcttg

SEQ ID NO: 2873 - DNA, 25 bp, Homo sapiens
  source 1..25: mol_type = other DNA
gtggaacattataagaagaatccta

SEQ ID NO: 2874 - DNA, 25 bp, Homo sapiens
  source 1..25: mol_type = other DNA
gaacattataagaagaatcctatgg

SEQ ID NO: 2875 - DNA, 25 bp, Homo sapiens
  source 1..25: mol_type = other DNA
aagaagaatcctatggtggaaacat

SEQ ID NO: 2876 - DNA, 25 bp, Homo sapiens
  source 1..25: mol_type = other DNA
agaagaatcctatggtggaaacatt

SEQ ID NO: 2877 - DNA, 25 bp, Homo sapiens
  source 1..25: mol_type = other DNA
ttgggtacagtactacaactcaagc

SEQ ID NO: 2878 - DNA, 25 bp, Homo sapiens
  source 1..25: mol_type = other DNA
ctacaactcaagcaggtgagcagat

SEQ ID NO: 2879 - DNA, 25 bp, Homo sapiens
  source 1..25: mol_type = other DNA
gtactgtacccaatgtttccaccat

SEQ ID NO: 2880 - DNA, 25 bp, Homo sapiens
  source 1..25: mol_type = other DNA
ctgagaccacagataaagtcaaaca

SEQ ID NO: 2881 - DNA, 25 bp, Homo sapiens
  source 1..25: mol_type = other DNA
cacagataaagtcaaacaaggcttt

SEQ ID NO: 2882 - DNA, 25 bp, Homo sapiens
  source 1..25: mol_type = other DNA
acagataaagtcaaacaaggctttt

SEQ ID NO: 2883 - DNA, 25 bp, Homo sapiens
  source 1..25: mol_type = other DNA
aaacaaggcttttgggaagaatttg

SEQ ID NO: 2884 - DNA, 25 bp, Homo sapiens
  source 1..25: mol_type = other DNA
cagcatttatacgagtcgtgttaag

SEQ ID NO: 2885 - DNA, 25 bp, Homo sapiens
  source 1..25: mol_type = other DNA
gcagcatttatacgagtcgtgttaa

SEQ ID NO: 2886 - DNA, 25 bp, Homo sapiens
  source 1..25: mol_type = other DNA
agcagcatttatacgagtcgtgtta

SEQ ID NO: 2887 - DNA, 25 bp, Homo sapiens
  source 1..25: mol_type = other DNA
caaaagccttgtttgactttatctg

SEQ ID NO: 2888 - DNA, 25 bp, Homo sapiens
  source 1..25: mol_type = other DNA
ctttctttccagacactacaacaac

SEQ ID NO: 2889 - DNA, 25 bp, Homo sapiens
  source 1..25: mol_type = other DNA
tgcaaacttctctacagccgaaaag

SEQ ID NO: 2890 - DNA, 25 bp, Homo sapiens
  source 1..25: mol_type = other DNA
gcaaacttctctacagccgaaaaga

SEQ ID NO: 2891 - DNA, 25 bp, Homo sapiens
  source 1..25: mol_type = other DNA
tctctacagccgaaaagagggtcaa

SEQ ID NO: 2892 - DNA, 25 bp, Homo sapiens
  source 1..25: mol_type = other DNA
tttgcactcctgttgttgtagtgtc

SEQ ID NO: 2893 - DNA, 25 bp, Homo sapiens
  source 1..25: mol_type = other DNA
gttttcttgcctttgaccctctttt

SEQ ID NO: 2894 - DNA, 25 bp, Homo sapiens
  source 1..25: mol_type = other DNA
agcggaatattgatacttacagggc

SEQ ID NO: 2895 - DNA, 25 bp, Homo sapiens
  source 1..25: mol_type = other DNA
tctttttcttctagttgatcatacc

SEQ ID NO: 2896 - DNA, 25 bp, Homo sapiens
  source 1..25: mol_type = other DNA
ctttttcttctagttgatcatacca

SEQ ID NO: 2897 - DNA, 25 bp, Homo sapiens
  source 1..25: mol_type = other DNA
atcataccagggttgtcctacacga

SEQ ID NO: 2898 - DNA, 25 bp, Homo sapiens
  source 1..25: mol_type = other DNA
gattacatcaatgcaaatatcatca

SEQ ID NO: 2899 - DNA, 25 bp, Homo sapiens
  source 1..25: mol_type = other DNA
ggatcaccatcgtgtaggacaaccc

SEQ ID NO: 2900 - DNA, 25 bp, Homo sapiens
  source 1..25: mol_type = other DNA
aggctcattgggatcaccatcgtgt

SEQ ID NO: 2901 - DNA, 25 bp, Homo sapiens
  source 1..25: mol_type = other DNA
tgatgtaatctgaaacaggctcatt

SEQ ID NO: 2902 - DNA, 25 bp, Homo sapiens
  source 1..25: mol_type = other DNA
ttgatgtaatctgaaacaggctcat

SEQ ID NO: 2903 - DNA, 25 bp, Homo sapiens
  source 1..25: mol_type = other DNA
tatttgcattgatgtaatctgaaac

SEQ ID NO: 2904 - DNA, 25 bp, Homo sapiens
  source 1..25: mol_type = other DNA
ccaaaaagagttacattgccacaca

SEQ ID NO: 2905 - DNA, 25 bp, Homo sapiens
  source 1..25: mol_type = other DNA
gccacacaaggctgcctgcaaaaca

SEQ ID NO: 2906 - DNA, 25 bp, Homo sapiens
  source 1..25: mol_type = other DNA
cctgcaaaacacggtgaatgacttt

SEQ ID NO: 2907 - DNA, 25 bp, Homo sapiens
  source 1..25: mol_type = other DNA
gcaaaacacggtgaatgacttttgg

SEQ ID NO: 2908 - DNA, 25 bp, Homo sapiens
  source 1..25: mol_type = other DNA
aacacggtgaatgacttttggcgga

SEQ ID NO: 2909 - DNA, 25 bp, Homo sapiens
  source 1..25: mol_type = other DNA
gtgattgtcatgacaacgaaagaag

SEQ ID NO: 2910 - DNA, 25 bp, Homo sapiens
  source 1..25: mol_type = other DNA
tcatgacaacgaaagaagtggagag

SEQ ID NO: 2911 - DNA, 25 bp, Homo sapiens
  source 1..25: mol_type = other DNA
acaacgaaagaagtggagagaggaa

SEQ ID NO: 2912 - DNA, 25 bp, Homo sapiens
  source 1..25: mol_type = other DNA
ggtttcaaattcaggctagaaattt

SEQ ID NO: 2913 - DNA, 25 bp, Homo sapiens
  source 1..25: mol_type = other DNA
aattgttgcacttggtttcaaattc

SEQ ID NO: 2914 - DNA, 25 bp, Homo sapiens
  source 1..25: mol_type = other DNA
tttttgggctttgaattgttgcact

SEQ ID NO: 2915 - DNA, 25 bp, Homo sapiens
  source 1..25: mol_type = other DNA
cttgtgtggcaatgtaactcttttt

SEQ ID NO: 2916 - DNA, 25 bp, Homo sapiens
  source 1..25: mol_type = other DNA
ccttgtgtggcaatgtaactctttt

SEQ ID NO: 2917 - DNA, 25 bp, Homo sapiens
  source 1..25: mol_type = other DNA
accgtgttttgcaggcagccttgtg

SEQ ID NO: 2918 - DNA, 25 bp, Homo sapiens
  source 1..25: mol_type = other DNA
ccaaaagtcattcaccgtgttttgc

SEQ ID NO: 2919 - DNA, 25 bp, Homo sapiens
  source 1..25: mol_type = other DNA
catgacaatcactcgggagttttct

SEQ ID NO: 2920 - DNA, 25 bp, Homo sapiens
  source 1..25: mol_type = other DNA
tctttcgttgtcatgacaatcactc

SEQ ID NO: 2921 - DNA, 25 bp, Homo sapiens
  source 1..25: mol_type = other DNA
ttctttcgttgtcatgacaatcact

SEQ ID NO: 2922 - DNA, 25 bp, Homo sapiens
  source 1..25: mol_type = other DNA
cttccagagtaaatgtgtcaaatac

SEQ ID NO: 2923 - DNA, 25 bp, Homo sapiens
  source 1..25: mol_type = other DNA
ctgatgagtatgctctaaaagaata

SEQ ID NO: 2924 - DNA, 25 bp, Homo sapiens
  source 1..25: mol_type = other DNA
aaaagaatatggcgtcatgcgtgtt

SEQ ID NO: 2925 - DNA, 25 bp, Homo sapiens
  source 1..25: mol_type = other DNA
acgctaagagaacttaaactttcaa

SEQ ID NO: 2926 - DNA, 25 bp, Homo sapiens
  source 1..25: mol_type = other DNA
taagagaacttaaactttcaaaggt

SEQ ID NO: 2927 - DNA, 25 bp, Homo sapiens
  source 1..25: mol_type = other DNA
aggccagtatttgacacatttactc

SEQ ID NO: 2928 - DNA, 25 bp, Homo sapiens
  source 1..25: mol_type = other DNA
catattcttttagagcatactcatc

SEQ ID NO: 2929 - DNA, 25 bp, Homo sapiens
  source 1..25: mol_type = other DNA
agttctcttagcgtatagtcatgag

SEQ ID NO: 2930 - DNA, 25 bp, Homo sapiens
  source 1..25: mol_type = other DNA
ttcttggctctactccaggggaata

SEQ ID NO: 2931 - DNA, 25 bp, Homo sapiens
  source 1..25: mol_type = other DNA
ctactccaggggaatacggagagaa

SEQ ID NO: 2932 - DNA, 25 bp, Homo sapiens
  source 1..25: mol_type = other DNA
ccaggggaatacggagagaacggtc

SEQ ID NO: 2933 - DNA, 25 bp, Homo sapiens
  source 1..25: mol_type = other DNA
gagaacggtctggcaataccacttt

SEQ ID NO: 2934 - DNA, 25 bp, Homo sapiens
  source 1..25: mol_type = other DNA
ggtctggcaataccactttcggacc

SEQ ID NO: 2935 - DNA, 25 bp, Homo sapiens
  source 1..25: mol_type = other DNA
tggcaataccactttcggacctggc

SEQ ID NO: 2936 - DNA, 25 bp, Homo sapiens
  source 1..25: mol_type = other DNA
accactttcggacctggccggacca

SEQ ID NO: 2937 - DNA, 25 bp, Homo sapiens
  source 1..25: mol_type = other DNA
cggaccacggcgtgcccagcgaccc

SEQ ID NO: 2938 - DNA, 25 bp, Homo sapiens
  source 1..25: mol_type = other DNA
ggaccacggcgtgcccagcgaccct

SEQ ID NO: 2939 - DNA, 25 bp, Homo sapiens
  source 1..25: mol_type = other DNA
gaccacggcgtgcccagcgaccctg

SEQ ID NO: 2940 - DNA, 25 bp, Homo sapiens
  source 1..25: mol_type = other DNA
accacggcgtgcccagcgaccctgg

SEQ ID NO: 2941 - DNA, 25 bp, Homo sapiens
  source 1..25: mol_type = other DNA
gtgcccagcgaccctgggggcgtgc

SEQ ID NO: 2942 - DNA, 25 bp, Homo sapiens
  source 1..25: mol_type = other DNA
gaccctgggggcgtgctggacttcc

SEQ ID NO: 2943 - DNA, 25 bp, Homo sapiens
  source 1..25: mol_type = other DNA
cctgggggcgtgctggacttcctgg

SEQ ID NO: 2944 - DNA, 25 bp, Homo sapiens
  source 1..25: mol_type = other DNA
gggggcgtgctggacttcctggagg

SEQ ID NO: 2945 - DNA, 25 bp, Homo sapiens
  source 1..25: mol_type = other DNA
ttcctggaggaggtgcaccataagc

SEQ ID NO: 2946 - DNA, 25 bp, Homo sapiens
  source 1..25: mol_type = other DNA
gtgcaccataagcaggagagcatca

SEQ ID NO: 2947 - DNA, 25 bp, Homo sapiens
  source 1..25: mol_type = other DNA
ataagcaggagagcatcatggatgc

SEQ ID NO: 2948 - DNA, 25 bp, Homo sapiens
  source 1..25: mol_type = other DNA
taagcaggagagcatcatggatgca

SEQ ID NO: 2949 - DNA, 25 bp, Homo sapiens
  source 1..25: mol_type = other DNA
caggagagcatcatggatgcagggc

SEQ ID NO: 2950 - DNA, 25 bp, Homo sapiens
  source 1..25: mol_type = other DNA
agcatcatggatgcagggccggtcg

SEQ ID NO: 2951 - DNA, 25 bp, Homo sapiens
  source 1..25: mol_type = other DNA
tgcagggccggtcgtggtgcactgc

SEQ ID NO: 2952 - DNA, 25 bp, Homo sapiens
  source 1..25: mol_type = other DNA
aggtgacagctcctgctgcccctct

SEQ ID NO: 2953 - DNA, 25 bp, Homo sapiens
  source 1..25: mol_type = other DNA
agcctgtccctgtctcctagcgccc

SEQ ID NO: 2954 - DNA, 25 bp, Homo sapiens
  source 1..25: mol_type = other DNA
gcctgtccctgtctcctagcgccca

SEQ ID NO: 2955 - DNA, 25 bp, Homo sapiens
  source 1..25: mol_type = other DNA
tacccactcctagctctttaactgt

SEQ ID NO: 2956 - DNA, 25 bp, Homo sapiens
  source 1..25: mol_type = other DNA
gtaggaagaatttaatatctgtttg

SEQ ID NO: 2957 - DNA, 25 bp, Homo sapiens
  source 1..25: mol_type = other DNA
tttgaggcatagagcaactgcattg

SEQ ID NO: 2958 - DNA, 25 bp, Homo sapiens
  source 1..25: mol_type = other DNA
ttgaggcatagagcaactgcattga

SEQ ID NO: 2959 - DNA, 25 bp, Homo sapiens
  source 1..25: mol_type = other DNA
tgcattgagggacattttgatccca

SEQ ID NO: 2960 - DNA, 25 bp, Homo sapiens
  source 1..25: mol_type = other DNA
ctcctagaccctacagcactgccat

SEQ ID NO: 2961 - DNA, 25 bp, Homo sapiens
  source 1..25: mol_type = other DNA
gaccctacagcactgccattggcca

SEQ ID NO: 2962 - DNA, 25 bp, Homo sapiens
  source 1..25: mol_type = other DNA
acagcactgccattggccatggcca

SEQ ID NO: 2963 - DNA, 25 bp, Homo sapiens
  source 1..25: mol_type = other DNA
agttgtgcattaaacaacttcatcc

SEQ ID NO: 2964 - DNA, 25 bp, Homo sapiens
  source 1..25: mol_type = other DNA
ccagaccgttctctccgtattcccc

SEQ ID NO: 2965 - DNA, 25 bp, Homo sapiens
  source 1..25: mol_type = other DNA
gccgtggtccggccaggtccgaaag

SEQ ID NO: 2966 - DNA, 25 bp, Homo sapiens
  source 1..25: mol_type = other DNA
tcgctgggcacgccgtggtccggcc

SEQ ID NO: 2967 - DNA, 25 bp, Homo sapiens
  source 1..25: mol_type = other DNA
cagggtcgctgggcacgccgtggtc

SEQ ID NO: 2968 - DNA, 25 bp, Homo sapiens
  source 1..25: mol_type = other DNA
gcccccagggtcgctgggcacgccg

SEQ ID NO: 2969 - DNA, 25 bp, Homo sapiens
  source 1..25: mol_type = other DNA
agtccagcacgcccccagggtcgct

SEQ ID NO: 2970 - DNA, 25 bp, Homo sapiens
  source 1..25: mol_type = other DNA
aagtccagcacgcccccagggtcgc

SEQ ID NO: 2971 - DNA, 25 bp, Homo sapiens
  source 1..25: mol_type = other DNA
ctccaggaagtccagcacgccccca

SEQ ID NO: 2972 - DNA, 25 bp, Homo sapiens
  source 1..25: mol_type = other DNA
cctccaggaagtccagcacgccccc

SEQ ID NO: 2973 - DNA, 25 bp, Homo sapiens
  source 1..25: mol_type = other DNA
ctcctgcttatggtgcacctcctcc

SEQ ID NO: 2974 - DNA, 25 bp, Homo sapiens
  source 1..25: mol_type = other DNA
tgcatccatgatgctctcctgctta

SEQ ID NO: 2975 - DNA, 25 bp, Homo sapiens
  source 1..25: mol_type = other DNA
gctgtcacctgcagtgcaccacgac

SEQ ID NO: 2976 - DNA, 25 bp, Homo sapiens
  source 1..25: mol_type = other DNA
acaggctgtggcctagaggggcagc

SEQ ID NO: 2977 - DNA, 25 bp, Homo sapiens
  source 1..25: mol_type = other DNA
gacagggacaggctgtggcctagag

SEQ ID NO: 2978 - DNA, 25 bp, Homo sapiens
  source 1..25: mol_type = other DNA
agacagggacaggctgtggcctaga

SEQ ID NO: 2979 - DNA, 25 bp, Homo sapiens
  source 1..25: mol_type = other DNA
gagacagggacaggctgtggcctag

SEQ ID NO: 2980 - DNA, 25 bp, Homo sapiens
  source 1..25: mol_type = other DNA
ggcgctaggagacagggacaggctg

SEQ ID NO: 2981 - DNA, 25 bp, Homo sapiens
  source 1..25: mol_type = other DNA
gccctgggcgctaggagacagggac

SEQ ID NO: 2982 - DNA, 25 bp, Homo sapiens
  source 1..25: mol_type = other DNA
agcaagccctgggcgctaggagaca

SEQ ID NO: 2983 - DNA, 25 bp, Homo sapiens
  source 1..25: mol_type = other DNA
aagcaagccctgggcgctaggagac

SEQ ID NO: 2984 - DNA, 25 bp, Homo sapiens
  source 1..25: mol_type = other DNA
taggtaaaagcaagccctgggcgct

SEQ ID NO: 2985 - DNA, 25 bp, Homo sapiens
  source 1..25: mol_type = other DNA
gagtgggtaggtaaaagcaagccct

SEQ ID NO: 2986 - DNA, 25 bp, Homo sapiens
  source 1..25: mol_type = other DNA
ggagtgggtaggtaaaagcaagccc

SEQ ID NO: 2987 - DNA, 25 bp, Homo sapiens
  source 1..25: mol_type = other DNA
tacagttaaagagctaggagtgggt

SEQ ID NO: 2988 - DNA, 25 bp, Homo sapiens
  source 1..25: mol_type = other DNA
ttcctacagttaaagagctaggagt

SEQ ID NO: 2989 - DNA, 25 bp, Homo sapiens
  source 1..25: mol_type = other DNA
cttcctacagttaaagagctaggag

SEQ ID NO: 2990 - DNA, 25 bp, Homo sapiens
  source 1..25: mol_type = other DNA
aaattcttcctacagttaaagagct

SEQ ID NO: 2991 - DNA, 25 bp, Homo sapiens
  source 1..25: mol_type = other DNA
gtagggtctaggagaaatatgcctt

SEQ ID NO: 2992 - DNA, 25 bp, Homo sapiens
  source 1..25: mol_type = other DNA
tgtagggtctaggagaaatatgcct

SEQ ID NO: 2993 - DNA, 25 bp, Homo sapiens
  source 1..25: mol_type = other DNA
ggccaatggcagtgctgtagggtct

SEQ ID NO: 2994 - DNA, 25 bp, Homo sapiens
  source 1..25: mol_type = other DNA
ggccatggccaatggcagtgctgta

SEQ ID NO: 2995 - DNA, 25 bp, Homo sapiens
  source 1..25: mol_type = other DNA
tggccatggccaatggcagtgctgt

SEQ ID NO: 2996 - DNA, 25 bp, Homo sapiens
  source 1..25: mol_type = other DNA
agcatgttgccatggccatggccaa

SEQ ID NO: 2997 - DNA, 25 bp, Homo sapiens
  source 1..25: mol_type = other DNA
ttaactgagcatgttgccatggcca

SEQ ID NO: 2998 - DNA, 25 bp, Homo sapiens
  source 1..25: mol_type = other DNA
gctgttttaactgagcatgttgcca

SEQ ID NO: 2999 - DNA, 25 bp, Homo sapiens
  source 1..25: mol_type = other DNA
aagttgtttaatgcacaacttctgg

SEQ ID NO: 3000 - DNA, 25 bp, Homo sapiens
  source 1..25: mol_type = other DNA
atgaagttgtttaatgcacaacttc

SEQ ID NO: 3001 - DNA, 25 bp, Homo sapiens
  source 1..25: mol_type = other DNA
gtccttctgcccgcagtgctggaat

SEQ ID NO: 3002 - DNA, 25 bp, Homo sapiens
  source 1..25: mol_type = other DNA
ttctgcccgcagtgctggaattggc

SEQ ID NO: 3003 - DNA, 25 bp, Homo sapiens
  source 1..25: mol_type = other DNA
cccgcagtgctggaattggccggac

SEQ ID NO: 3004 - DNA, 25 bp, Homo sapiens
  source 1..25: mol_type = other DNA
ccgcagtgctggaattggccggaca

SEQ ID NO: 3005 - DNA, 25 bp, Homo sapiens
  source 1..25: mol_type = other DNA
ttcttattgacatcatcagagagaa

SEQ ID NO: 3006 - DNA, 25 bp, Homo sapiens
  source 1..25: mol_type = other DNA
ttattgacatcatcagagagaaagg

SEQ ID NO: 3007 - DNA, 25 bp, Homo sapiens
  source 1..25: mol_type = other DNA
tattgacatcatcagagagaaaggt

SEQ ID NO: 3008 - DNA, 25 bp, Homo sapiens
  source 1..25: mol_type = other DNA
tcatcagagagaaaggtgggtcatc

SEQ ID NO: 3009 - DNA, 25 bp, Homo sapiens
  source 1..25: mol_type = other DNA
tcagagagaaaggtgggtcatctgg

SEQ ID NO: 3010 - DNA, 25 bp, Homo sapiens
  source 1..25: mol_type = other DNA
cagagagaaaggtgggtcatctggt

SEQ ID NO: 3011 - DNA, 25 bp, Homo sapiens
  source 1..25: mol_type = other DNA
ggccaattccagcactgcgggcaga

SEQ ID NO: 3012 - DNA, 25 bp, Homo sapiens
  source 1..25: mol_type = other DNA
cctgtccggccaattccagcactgc

SEQ ID NO: 3013 - DNA, 25 bp, Homo sapiens
  source 1..25: mol_type = other DNA
ccctgtccggccaattccagcactg

SEQ ID NO: 3014 - DNA, 25 bp, Homo sapiens
  source 1..25: mol_type = other DNA
atcaatcacaatgaacgtccctgtc

SEQ ID NO: 3015 - DNA, 25 bp, Homo sapiens
  source 1..25: mol_type = other DNA
attgacgttcccaaaaccatccaga

SEQ ID NO: 3016 - DNA, 25 bp, Homo sapiens
  source 1..25: mol_type = other DNA
cgttcccaaaaccatccagatggtg

SEQ ID NO: 3017 - DNA, 25 bp, Homo sapiens
  source 1..25: mol_type = other DNA
aaccatccagatggtgcggtctcag

SEQ ID NO: 3018 - DNA, 25 bp, Homo sapiens
  source 1..25: mol_type = other DNA
tccagatggtgcggtctcagaggtc

SEQ ID NO: 3019 - DNA, 25 bp, Homo sapiens
  source 1..25: mol_type = other DNA
ccagatggtgcggtctcagaggtca

SEQ ID NO: 3020 - DNA, 25 bp, Homo sapiens
  source 1..25: mol_type = other DNA
atggtgcggtctcagaggtcaggga

SEQ ID NO: 3021 - DNA, 25 bp, Homo sapiens
  source 1..25: mol_type = other DNA
gaagcacagtaccgatttatctata

SEQ ID NO: 3022 - DNA, 25 bp, Homo sapiens
  source 1..25: mol_type = other DNA
gcacagtaccgatttatctatatgg

SEQ ID NO: 3023 - DNA, 25 bp, Homo sapiens
  source 1..25: mol_type = other DNA
gcattatattgaaacactacagcgc

SEQ ID NO: 3024 - DNA, 25 bp, Homo sapiens
  source 1..25: mol_type = other DNA
ctacagcgcaggattgaagaagagc

SEQ ID NO: 3025 - DNA, 25 bp, Homo sapiens
  source 1..25: mol_type = other DNA
ttgaagaagagcaggtaccagcctg

SEQ ID NO: 3026 - DNA, 25 bp, Homo sapiens
  source 1..25: mol_type = other DNA
tgaagaagagcaggtaccagcctga

SEQ ID NO: 3027 - DNA, 25 bp, Homo sapiens
  source 1..25: mol_type = other DNA
gaagagcaggtaccagcctgagggc

SEQ ID NO: 3028 - DNA, 25 bp, Homo sapiens
  source 1..25: mol_type = other DNA
tcaatatcgcagtcaacacctacga

SEQ ID NO: 3029 - DNA, 25 bp, Homo sapiens
  source 1..25: mol_type = other DNA
gagaccgcaccatctggatggtttt

SEQ ID NO: 3030 - DNA, 25 bp, Homo sapiens
  source 1..25: mol_type = other DNA
tgagaccgcaccatctggatggttt

SEQ ID NO: 3031 - DNA, 25 bp, Homo sapiens
  source 1..25: mol_type = other DNA
gacctctgagaccgcaccatctgga

SEQ ID NO: 3032 - DNA, 25 bp, Homo sapiens
  source 1..25: mol_type = other DNA
ccctgacctctgagaccgcaccatc

SEQ ID NO: 3033 - DNA, 25 bp, Homo sapiens
  source 1..25: mol_type = other DNA
gataaatcggtactgtgcttctgtc

SEQ ID NO: 3034 - DNA, 25 bp, Homo sapiens
  source 1..25: mol_type = other DNA
atgctggaccgccatatagataaat

SEQ ID NO: 3035 - DNA, 25 bp, Homo sapiens
  source 1..25: mol_type = other DNA
gcgctgtagtgtttcaatataatgc

SEQ ID NO: 3036 - DNA, 25 bp, Homo sapiens
  source 1..25: mol_type = other DNA
ctcttccaaatttcagaaaagcaag

SEQ ID NO: 3037 - DNA, 25 bp, Homo sapiens
  source 1..25: mol_type = other DNA
ccaaatttcagaaaagcaagaggaa

SEQ ID NO: 3038 - DNA, 25 bp, Homo sapiens
  source 1..25: mol_type = other DNA
caaatttcagaaaagcaagaggaaa

SEQ ID NO: 3039 - DNA, 25 bp, Homo sapiens
  source 1..25: mol_type = other DNA
tatacaaatattaagtattctctag

SEQ ID NO: 3040 - DNA, 25 bp, Homo sapiens
  source 1..25: mol_type = other DNA
agtattctctagcggaccagacgag

SEQ ID NO: 3041 - DNA, 25 bp, Homo sapiens
  source 1..25: mol_type = other DNA
ccctgtgcagagtaagtagtgctga

SEQ ID NO: 3042 - DNA, 25 bp, Homo sapiens
  source 1..25: mol_type = other DNA
cctttcctcttgcttttctgaaatt

SEQ ID NO: 3043 - DNA, 25 bp, Homo sapiens
  source 1..25: mol_type = other DNA
gagagggctctgatctccactcgtc

SEQ ID NO: 3044 - DNA, 25 bp, Homo sapiens
  source 1..25: mol_type = other DNA
tggcgttggagtacaaggcgggaga

SEQ ID NO: 3045 - DNA, 25 bp, Homo sapiens
  source 1..25: mol_type = other DNA
gtggcgttggagtacaaggcgggag

SEQ ID NO: 3046 - DNA, 25 bp, Homo sapiens
  source 1..25: mol_type = other DNA
acagggtggcgttggagtacaaggc

SEQ ID NO: 3047 - DNA, 25 bp, Homo sapiens
  source 1..25: mol_type = other DNA
cacagggtggcgttggagtacaagg

SEQ ID NO: 3048 - DNA, 25 bp, Homo sapiens
  source 1..25: mol_type = other DNA
ctgcacagggtggcgttggagtaca

SEQ ID NO: 3049 - DNA, 25 bp, Homo sapiens
  source 1..25: mol_type = other DNA
ctacttactctgcacagggtggcgt

SEQ ID NO: 3050 - DNA, 25 bp, Homo sapiens
  source 1..25: mol_type = other DNA
tcagcactacttactctgcacaggg

SEQ ID NO: 3051 - DNA, 25 bp, Homo sapiens
  source 1..25: mol_type = other DNA
ccttcagcactacttactctgcaca

SEQ ID NO: 3052 - DNA, 25 bp, Homo sapiens
  source 1..25: mol_type = other DNA
tccttcagcactacttactctgcac

SEQ ID NO: 3053 - DNA, 25 bp, Homo sapiens
  source 1..25: mol_type = other DNA
gacagtgctagagtctatgaaaacg

SEQ ID NO: 3054 - DNA, 25 bp, Homo sapiens
  source 1..25: mol_type = other DNA
acagtgctagagtctatgaaaacgt

SEQ ID NO: 3055 - DNA, 25 bp, Homo sapiens
  source 1..25: mol_type = other DNA
cctgccaaaacttcagcacagaaat

SEQ ID NO: 3056 - DNA, 25 bp, Homo sapiens
  source 1..25: mol_type = other DNA
actctagcactgtcttctctcattc

SEQ ID NO: 3057 - DNA, 25 bp, Homo sapiens
  source 1..25: mol_type = other DNA
tctgaaacttttctgctgttgcatc

SEQ ID NO: 3058 - DNA, 25 bp, Homo sapiens
  source 1..25: mol_type = other DNA
cctatttctgtgctgaagttttggc

SEQ ID NO: 3059 - DNA, 25 bp, Homo sapiens
  source 1..25: mol_type = other DNA
aatacctatttctgtgctgaagttt

SEQ ID NO: 3060 - DNA, 25 bp, Homo sapiens
  source 1..25: mol_type = other DNA
agaaagtttatgtgaagacagaatt

SEQ ID NO: 3061 - DNA, 25 bp, Homo sapiens
  source 1..25: mol_type = other DNA
tttatgtgaagacagaatttggatt

SEQ ID NO: 3062 - DNA, 25 bp, Homo sapiens
  source 1..25: mol_type = other DNA
tgtgaagacagaatttggatttgga

SEQ ID NO: 3063 - DNA, 25 bp, Homo sapiens
  source 1..25: mol_type = other DNA
atttggatttggaaggcttgcaatg

SEQ ID NO: 3064 - DNA, 25 bp, Homo sapiens
  source 1..25: mol_type = other DNA
attttatagaatttgtttgaaattg

SEQ ID NO: 3065 - DNA, 25 bp, Homo sapiens
  source 1..25: mol_type = other DNA
attgtgcgctgtattttgcagatta

SEQ ID NO: 3066 - DNA, 25 bp, Homo sapiens
  source 1..25: mol_type = other DNA
ttgtgcgctgtattttgcagattat

SEQ ID NO: 3067 - DNA, 25 bp, Homo sapiens
  source 1..25: mol_type = other DNA
tgtgcgctgtattttgcagattatg

SEQ ID NO: 3068 - DNA, 25 bp, Homo sapiens
  source 1..25: mol_type = other DNA
ttatggggattcaaattctagtaat

SEQ ID NO: 3069 - DNA, 25 bp, Homo sapiens
  source 1..25: mol_type = other DNA
gtttaattttttttttcctcattgt

SEQ ID NO: 3070 - DNA, 25 bp, Homo sapiens
  source 1..25: mol_type = other DNA
tttaattttttttttcctcattgtt

SEQ ID NO: 3071 - DNA, 25 bp, Homo sapiens
  source 1..25: mol_type = other DNA
ttaattttttttttcctcattgttg

SEQ ID NO: 3072 - DNA, 25 bp, Homo sapiens
  source 1..25: mol_type = other DNA
ttggggatgatgagaagaaatgatt

SEQ ID NO: 3073 - DNA, 25 bp, Homo sapiens
  source 1..25: mol_type = other DNA
tggggatgatgagaagaaatgattt

SEQ ID NO: 3074 - DNA, 25 bp, Homo sapiens
  source 1..25: mol_type = other DNA
tcatttaccatcatgtatccagtag

SEQ ID NO: 3075 - DNA, 25 bp, Homo sapiens
  source 1..25: mol_type = other DNA
tccagtagtggataattcattttga

SEQ ID NO: 3076 - DNA, 25 bp, Homo sapiens
  source 1..25: mol_type = other DNA
aattcattttgatggcttctatttt

SEQ ID NO: 3077 - DNA, 25 bp, Homo sapiens
  source 1..25: mol_type = other DNA
gactgtcagaagttgacctttgcac

SEQ ID NO: 3078 - DNA, 25 bp, Homo sapiens
  source 1..25: mol_type = other DNA
ttaaagagtcatagaaaaagaatca

SEQ ID NO: 3079 - DNA, 25 bp, Homo sapiens
  source 1..25: mol_type = other DNA
aagaatcatggatatttatgaatta

SEQ ID NO: 3080 - DNA, 25 bp, Homo sapiens
  source 1..25: mol_type = other DNA
atggatatttatgaattaaggtaag

SEQ ID NO: 3081 - DNA, 25 bp, Homo sapiens
  source 1..25: mol_type = other DNA
tatttatgaattaaggtaagaggtg

SEQ ID NO: 3082 - DNA, 25 bp, Homo sapiens
  source 1..25: mol_type = other DNA
ttccagccgttgaccaattatagtt

SEQ ID NO: 3083 - DNA, 25 bp, Homo sapiens
  source 1..25: mol_type = other DNA
gttcggctgttgactgagaagtttg

SEQ ID NO: 3084 - DNA, 25 bp, Homo sapiens
  source 1..25: mol_type = other DNA
cggctgttgactgagaagtttgtgg

SEQ ID NO: 3085 - DNA, 25 bp, Homo sapiens
  source 1..25: mol_type = other DNA
ggctgttgactgagaagtttgtggt

SEQ ID NO: 3086 - DNA, 25 bp, Homo sapiens
  source 1..25: mol_type = other DNA
aataattgtcttgtacttagaaaaa

SEQ ID NO: 3087 - DNA, 25 bp, Homo sapiens
  source 1..25: mol_type = other DNA
ggcgtctatgaatgaccagtgtttt

SEQ ID NO: 3088 - DNA, 25 bp, Homo sapiens
  source 1..25: mol_type = other DNA
tgacaaacttatcccaaaactttag

SEQ ID NO: 3089 - DNA, 25 bp, Homo sapiens
  source 1..25: mol_type = other DNA
cccccaactgttagtcaatctgagc

SEQ ID NO: 3090 - DNA, 25 bp, Homo sapiens
  source 1..25: mol_type = other DNA
ccccaactgttagtcaatctgagct

SEQ ID NO: 3091 - DNA, 25 bp, Homo sapiens
  source 1..25: mol_type = other DNA
ttagtcaatctgagctgggctcagc

SEQ ID NO: 3092 - DNA, 25 bp, Homo sapiens
  source 1..25: mol_type = other DNA
tagtcaatctgagctgggctcagct

SEQ ID NO: 3093 - DNA, 25 bp, Homo sapiens
  source 1..25: mol_type = other DNA
ctgggctgttcttctgccagcctgc

SEQ ID NO: 3094 - DNA, 25 bp, Homo sapiens
  source 1..25: mol_type = other DNA
ggctgttcttctgccagcctgcagg

SEQ ID NO: 3095 - DNA, 25 bp, Homo sapiens
  source 1..25: mol_type = other DNA
gccagcctgcaggtggccactcatg

SEQ ID NO: 3096 - DNA, 25 bp, Homo sapiens
  source 1..25: mol_type = other DNA
gcaggtggccactcatgtggtcagc

SEQ ID NO: 3097 - DNA, 25 bp, Homo sapiens
  source 1..25: mol_type = other DNA
gtggccactcatgtggtcagcaggt

SEQ ID NO: 3098 - DNA, 25 bp, Homo sapiens
  source 1..25: mol_type = other DNA
gccactcatgtggtcagcaggtcgg

SEQ ID NO: 3099 - DNA, 25 bp, Homo sapiens
  source 1..25: mol_type = other DNA
gtggtcagcaggtcggcggagagac

SEQ ID NO: 3100 - DNA, 25 bp, Homo sapiens
  source 1..25: mol_type = other DNA
tggtcagcaggtcggcggagagact

SEQ ID NO: 3101 - DNA, 25 bp, Homo sapiens
  source 1..25: mol_type = other DNA
cagcaggtcggcggagagactggga

SEQ ID NO: 3102 - DNA, 25 bp, Homo sapiens
  source 1..25: mol_type = other DNA
aggtcggcggagagactgggatggc

SEQ ID NO: 3103 - DNA, 25 bp, Homo sapiens
  source 1..25: mol_type = other DNA
ggtcggcggagagactgggatggct

SEQ ID NO: 3104 - DNA, 25 bp, Homo sapiens
  source 1..25: mol_type = other DNA
tccttcttcgtgtagtctctttcag

SEQ ID NO: 3105 - DNA, 25 bp, Homo sapiens
  source 1..25: mol_type = other DNA
cttcgtgtagtctctttcagtggcc

SEQ ID NO: 3106 - DNA, 25 bp, Homo sapiens
  source 1..25: mol_type = other DNA
gtgtagtctctttcagtggcctggc

SEQ ID NO: 3107 - DNA, 25 bp, Homo sapiens
  source 1..25: mol_type = other DNA
agtctctttcagtggcctggctggc

SEQ ID NO: 3108 - DNA, 25 bp, Homo sapiens
  source 1..25: mol_type = other DNA
gtctctttcagtggcctggctggca

SEQ ID NO: 3109 - DNA, 25 bp, Homo sapiens
  source 1..25: mol_type = other DNA
gctcccaagagctcaaaagcagaaa

SEQ ID NO: 3110 - DNA, 25 bp, Homo sapiens
  source 1..25: mol_type = other DNA
caagagctcaaaagcagaaatggcc

SEQ ID NO: 3111 - DNA, 25 bp, Homo sapiens
  source 1..25: mol_type = other DNA
atgatgatgatgatgatgatgatga

SEQ ID NO: 3112 - DNA, 25 bp, Homo sapiens
  source 1..25: mol_type = other DNA
tggttttttctaatcagaagaaagc

SEQ ID NO: 3113 - DNA, 25 bp, Homo sapiens
  source 1..25: mol_type = other DNA
ggttttttctaatcagaagaaagct

SEQ ID NO: 3114 - DNA, 25 bp, Homo sapiens
  source 1..25: mol_type = other DNA
gttttttctaatcagaagaaagctg

SEQ ID NO: 3115 - DNA, 25 bp, Homo sapiens
  source 1..25: mol_type = other DNA
acaagcccagctcagattcaagaaa

SEQ ID NO: 3116 - DNA, 25 bp, Homo sapiens
  source 1..25: mol_type = other DNA
caagcccagctcagattcaagaaaa

SEQ ID NO: 3117 - DNA, 25 bp, Homo sapiens
  source 1..25: mol_type = other DNA
gattcaagaaaagggtgtgaagtag

SEQ ID NO: 3118 - DNA, 25 bp, Homo sapiens
  source 1..25: mol_type = other DNA
ggtgtgaagtagaggtgcagttaag

SEQ ID NO: 3119 - DNA, 25 bp, Homo sapiens
  source 1..25: mol_type = other DNA
gtgtgaagtagaggtgcagttaagt

SEQ ID NO: 3120 - DNA, 25 bp, Homo sapiens
  source 1..25: mol_type = other DNA
tgtgaagtagaggtgcagttaagtg

SEQ ID NO: 3121 - DNA, 25 bp, Homo sapiens
  source 1..25: mol_type = other DNA
gtgaagtagaggtgcagttaagtgg

SEQ ID NO: 3122 - DNA, 25 bp, Homo sapiens
  source 1..25: mol_type = other DNA
tgaagtagaggtgcagttaagtggg

SEQ ID NO: 3123 - DNA, 25 bp, Homo sapiens
  source 1..25: mol_type = other DNA
agtggggggccactagtctaacaga

SEQ ID NO: 3124 - DNA, 25 bp, Homo sapiens
  source 1..25: mol_type = other DNA
taacagacggtcacaaccagtgcca

SEQ ID NO: 3125 - DNA, 25 bp, Homo sapiens
  source 1..25: mol_type = other DNA
tcacaaccagtgccatggaaaacca

SEQ ID NO: 3126 - DNA, 25 bp, Homo sapiens
  source 1..25: mol_type = other DNA
caaaagcagaagttgctagtgacct

SEQ ID NO: 3127 - DNA, 25 bp, Homo sapiens
  source 1..25: mol_type = other DNA
aaaagcagaagttgctagtgacctt

SEQ ID NO: 3128 - DNA, 25 bp, Homo sapiens
  source 1..25: mol_type = other DNA
ggaagccgaagctgcttacagtagc

SEQ ID NO: 3129 - DNA, 25 bp, Homo sapiens
  source 1..25: mol_type = other DNA
gaagccgaagctgcttacagtagct

SEQ ID NO: 3130 - DNA, 25 bp, Homo sapiens
  source 1..25: mol_type = other DNA
gaaagtcagactaagaaataaagag

SEQ ID NO: 3131 - DNA, 25 bp, Homo sapiens
  source 1..25: mol_type = other DNA
aaagtcagactaagaaataaagaga

SEQ ID NO: 3132 - DNA, 25 bp, Homo sapiens
  source 1..25: mol_type = other DNA
tttctgctagccctgagcctatttt

SEQ ID NO: 3133 - DNA, 25 bp, Homo sapiens
  source 1..25: mol_type = other DNA
tgagcctatttttggaaccagcact

SEQ ID NO: 3134 - DNA, 25 bp, Homo sapiens
  source 1..25: mol_type = other DNA
gagcctatttttggaaccagcactt

SEQ ID NO: 3135 - DNA, 25 bp, Homo sapiens
  source 1..25: mol_type = other DNA
agcctatttttggaaccagcacttg

SEQ ID NO: 3136 - DNA, 25 bp, Homo sapiens
  source 1..25: mol_type = other DNA
agcacttggggaaactgatcttgtg

SEQ ID NO: 3137 - DNA, 25 bp, Homo sapiens
  source 1..25: mol_type = other DNA
cttggggaaactgatcttgtgagga

SEQ ID NO: 3138 - DNA, 25 bp, Homo sapiens
  source 1..25: mol_type = other DNA
tgatcttgtgaggatggatgtgttt

SEQ ID NO: 3139 - DNA, 25 bp, Homo sapiens
  source 1..25: mol_type = other DNA
gatcttgtgaggatggatgtgttta

SEQ ID NO: 3140 - DNA, 25 bp, Homo sapiens
  source 1..25: mol_type = other DNA
tgaggatggatgtgtttagggacac

SEQ ID NO: 3141 - DNA, 25 bp, Homo sapiens
  source 1..25: mol_type = other DNA
gaggatggatgtgtttagggacaca

SEQ ID NO: 3142 - DNA, 25 bp, Homo sapiens
  source 1..25: mol_type = other DNA
gcttttgagagcagcaccaccccac

SEQ ID NO: 3143 - DNA, 25 bp, Homo sapiens
  source 1..25: mol_type = other DNA
cttttgagagcagcaccaccccact

SEQ ID NO: 3144 - DNA, 25 bp, Homo sapiens
  source 1..25: mol_type = other DNA
ttttgagagcagcaccaccccactg

SEQ ID NO: 3145 - DNA, 25 bp, Homo sapiens
  source 1..25: mol_type = other DNA
caccccactggggcatccccagact

SEQ ID NO: 3146 - DNA, 25 bp, Homo sapiens
  source 1..25: mol_type = other DNA
accccactggggcatccccagactt

SEQ ID NO: 3147 - DNA, 25 bp, Homo sapiens
  source 1..25: mol_type = other DNA
aaacgtgactctttcttaatgccac

SEQ ID NO: 3148 - DNA, 25 bp, Homo sapiens
  source 1..25: mol_type = other DNA
aacgtgactctttcttaatgccact

SEQ ID NO: 3149 - DNA, 25 bp, Homo sapiens
  source 1..25: mol_type = other DNA
ttcttaatgccactgggttttagtc

SEQ ID NO: 3150 - DNA, 25 bp, Homo sapiens
  source 1..25: mol_type = other DNA
gggttttagtcaggccacagtgaga

SEQ ID NO: 3151 - DNA, 25 bp, Homo sapiens
  source 1..25: mol_type = other DNA
cacagtgagaaggaacagccctaac

SEQ ID NO: 3152 - DNA, 25 bp, Homo sapiens
  source 1..25: mol_type = other DNA
gaacagccctaacaggcctccagcc

SEQ ID NO: 3153 - DNA, 25 bp, Homo sapiens
  source 1..25: mol_type = other DNA
gcctcatatgttgaatcatccagtg

SEQ ID NO: 3154 - DNA, 25 bp, Homo sapiens
  source 1..25: mol_type = other DNA
gcggatatttcaatgaaaatatcat

SEQ ID NO: 3155 - DNA, 25 bp, Homo sapiens
  source 1..25: mol_type = other DNA
aaatatcattggttgacttttgtga

SEQ ID NO: 3156 - DNA, 25 bp, Homo sapiens
  source 1..25: mol_type = other DNA
gacttttgtgatggtaataatgcta

SEQ ID NO: 3157 - DNA, 25 bp, Homo sapiens
  source 1..25: mol_type = other DNA
ctatggcatctttgccatgaagttg

SEQ ID NO: 3158 - DNA, 25 bp, Homo sapiens
  source 1..25: mol_type = other DNA
ctttgccatgaagttgtggcctcct

SEQ ID NO: 3159 - DNA, 25 bp, Homo sapiens
  source 1..25: mol_type = other DNA
tggcctccttggattcttctgactt

SEQ ID NO: 3160 - DNA, 25 bp, Homo sapiens
  source 1..25: mol_type = other DNA
gattcttctgactttggcttctgaa

SEQ ID NO: 3161 - DNA, 25 bp, Homo sapiens
  source 1..25: mol_type = other DNA
cttctgactttggcttctgaaagga

SEQ ID NO: 3162 - DNA, 25 bp, Homo sapiens
  source 1..25: mol_type = other DNA
tgaaaggaaggcctagatccagccc

SEQ ID NO: 3163 - DNA, 25 bp, Homo sapiens
  source 1..25: mol_type = other DNA
aaggaaggcctagatccagccctgg

SEQ ID NO: 3164 - DNA, 25 bp, Homo sapiens
  source 1..25: mol_type = other DNA
cagccctggtggtagttcctttctg

SEQ ID NO: 3165 - DNA, 25 bp, Homo sapiens
  source 1..25: mol_type = other DNA
gaggtctctcagtcccttgagactt

SEQ ID NO: 3166 - DNA, 25 bp, Homo sapiens
  source 1..25: mol_type = other DNA
aggtctctcagtcccttgagacttt

SEQ ID NO: 3167 - DNA, 25 bp, Homo sapiens
  source 1..25: mol_type = other DNA
ggtctctcagtcccttgagactttg

SEQ ID NO: 3168 - DNA, 25 bp, Homo sapiens
  source 1..25: mol_type = other DNA
agtcccttgagactttggggtagtt

SEQ ID NO: 3169 - DNA, 25 bp, Homo sapiens
  source 1..25: mol_type = other DNA
tgaactttgaattgcttcagaacac

SEQ ID NO: 3170 - DNA, 25 bp, Homo sapiens
  source 1..25: mol_type = other DNA
tttgaattgcttcagaacacaggtg

SEQ ID NO: 3171 - DNA, 25 bp, Homo sapiens
  source 1..25: mol_type = other DNA
gcttcagaacacaggtgtggcctga

SEQ ID NO: 3172 - DNA, 25 bp, Homo sapiens
  source 1..25: mol_type = other DNA
tgtggcctgaaggtattcccttatt

SEQ ID NO: 3173 - DNA, 25 bp, Homo sapiens
  source 1..25: mol_type = other DNA
gtggcctgaaggtattcccttatta

SEQ ID NO: 3174 - DNA, 25 bp, Homo sapiens
  source 1..25: mol_type = other DNA
catcgactcattctccattttgctt

SEQ ID NO: 3175 - DNA, 25 bp, Homo sapiens
  source 1..25: mol_type = other DNA
gttttgtcttgacttgacttgactt

SEQ ID NO: 3176 - DNA, 25 bp, Homo sapiens
  source 1..25: mol_type = other DNA
ttttgtcttgacttgacttgacttt

SEQ ID NO: 3177 - DNA, 25 bp, Homo sapiens
  source 1..25: mol_type = other DNA
tttgtcttgacttgacttgactttg

SEQ ID NO: 3178 - DNA, 25 bp, Homo sapiens
  source 1..25: mol_type = other DNA
ttgtcttgacttgacttgactttgg

SEQ ID NO: 3179 - DNA, 25 bp, Homo sapiens
  source 1..25: mol_type = other DNA
agatcagttgcttttatactcagaa

SEQ ID NO: 3180 - DNA, 25 bp, Homo sapiens
  source 1..25: mol_type = other DNA
tactcagaatggaaatacctgatct

SEQ ID NO: 3181 - DNA, 25 bp, Homo sapiens
  source 1..25: mol_type = other DNA
gatttcatttagatttccctccacg

SEQ ID NO: 3182 - DNA, 25 bp, Homo sapiens
  source 1..25: mol_type = other DNA
aactatcatgttcttatgtaaactt

SEQ ID NO: 3183 - DNA, 25 bp, Homo sapiens
  source 1..25: mol_type = other DNA
catgttcttatgtaaacttaggcca

SEQ ID NO: 3184 - DNA, 25 bp, Homo sapiens
  source 1..25: mol_type = other DNA
caaggccagagttatcatagtccct

SEQ ID NO: 3185 - DNA, 25 bp, Homo sapiens
  source 1..25: mol_type = other DNA
agttatcatagtccctaggttgcta

SEQ ID NO: 3186 - DNA, 25 bp, Homo sapiens
  source 1..25: mol_type = other DNA
aggttgctacggcttatcatgtgct

SEQ ID NO: 3187 - DNA, 25 bp, Homo sapiens
  source 1..25: mol_type = other DNA
tacggcttatcatgtgcttggtaaa

SEQ ID NO: 3188 - DNA, 25 bp, Homo sapiens
  source 1..25: mol_type = other DNA
catgtgcttggtaaaaggtgatcgc

SEQ ID NO: 3189 - DNA, 25 bp, Homo sapiens
  source 1..25: mol_type = other DNA
tcagacgagtttactttacatgaga

SEQ ID NO: 3190 - DNA, 25 bp, Homo sapiens
  source 1..25: mol_type = other DNA
agtttactttacatgagatggaatc

SEQ ID NO: 3191 - DNA, 25 bp, Homo sapiens
  source 1..25: mol_type = other DNA
ttacatgagatggaatcaggcagag

SEQ ID NO: 3192 - DNA, 25 bp, Homo sapiens
  source 1..25: mol_type = other DNA
atgagatggaatcaggcagagaggc

SEQ ID NO: 3193 - DNA, 25 bp, Homo sapiens
  source 1..25: mol_type = other DNA
tgagatggaatcaggcagagaggct

SEQ ID NO: 3194 - DNA, 25 bp, Homo sapiens
  source 1..25: mol_type = other DNA
gaatcaggcagagaggctgggatga

SEQ ID NO: 3195 - DNA, 25 bp, Homo sapiens
  source 1..25: mol_type = other DNA
aggctgggatgatggagaaagctcg

SEQ ID NO: 3196 - DNA, 25 bp, Homo sapiens
  source 1..25: mol_type = other DNA
aggtgaagttttaaaaaaaaagttg

SEQ ID NO: 3197 - DNA, 25 bp, Homo sapiens
  source 1..25: mol_type = other DNA
aagttttaaaaaaaaagttgtggaa

SEQ ID NO: 3198 - DNA, 25 bp, Homo sapiens
  source 1..25: mol_type = other DNA
agttgtggaaaggaaagttccaaag

SEQ ID NO: 3199 - DNA, 25 bp, Homo sapiens
  source 1..25: mol_type = other DNA
tgtggaaaggaaagttccaaagagg

SEQ ID NO: 3200 - DNA, 25 bp, Homo sapiens
  source 1..25: mol_type = other DNA
gaaagttccaaagaggtggtttctg

SEQ ID NO: 3201 - DNA, 25 bp, Homo sapiens
  source 1..25: mol_type = other DNA
ggtttctgaggaagtcagagcgccc

SEQ ID NO: 3202 - DNA, 25 bp, Homo sapiens
  source 1..25: mol_type = other DNA
gtttctgaggaagtcagagcgccca

SEQ ID NO: 3203 - DNA, 25 bp, Homo sapiens
  source 1..25: mol_type = other DNA
cgcccagggccagagcagtcagtaa

SEQ ID NO: 3204 - DNA, 25 bp, Homo sapiens
  source 1..25: mol_type = other DNA
gcccagggccagagcagtcagtaat

SEQ ID NO: 3205 - DNA, 25 bp, Homo sapiens
  source 1..25: mol_type = other DNA
cagagcagtcagtaatgggtgaatg

SEQ ID NO: 3206 - DNA, 25 bp, Homo sapiens
  source 1..25: mol_type = other DNA
tcagtaatgggtgaatgaggttgtt

SEQ ID NO: 3207 - DNA, 25 bp, Homo sapiens
  source 1..25: mol_type = other DNA
gggtgaatgaggttgtttggaaagt

SEQ ID NO: 3208 - DNA, 25 bp, Homo sapiens
  source 1..25: mol_type = other DNA
ttggaaagtcggtgtgacagacaca

SEQ ID NO: 3209 - DNA, 25 bp, Homo sapiens
  source 1..25: mol_type = other DNA
agacacatggatgccatctacttct

SEQ ID NO: 3210 - DNA, 25 bp, Homo sapiens
  source 1..25: mol_type = other DNA
tggatgccatctacttctaggttgc

SEQ ID NO: 3211 - DNA, 25 bp, Homo sapiens
  source 1..25: mol_type = other DNA
atgccatctacttctaggttgctgg

SEQ ID NO: 3212 - DNA, 25 bp, Homo sapiens
  source 1..25: mol_type = other DNA
tgccatctacttctaggttgctggt

SEQ ID NO: 3213 - DNA, 25 bp, Homo sapiens
  source 1..25: mol_type = other DNA
atgcacaatattccatagctcactg

SEQ ID NO: 3214 - DNA, 25 bp, Homo sapiens
  source 1..25: mol_type = other DNA
ctgaggattttaaaattataagcat

SEQ ID NO: 3215 - DNA, 25 bp, Homo sapiens
  source 1..25: mol_type = other DNA
attataagcataggattttatattt

SEQ ID NO: 3216 - DNA, 25 bp, Homo sapiens
  source 1..25: mol_type = other DNA
ttataagcataggattttatatttt

SEQ ID NO: 3217 - DNA, 25 bp, Homo sapiens
  source 1..25: mol_type = other DNA
tataagcataggattttatattttg

SEQ ID NO: 3218 - DNA, 25 bp, Homo sapiens
  source 1..25: mol_type = other DNA
tatattttggggtgaaagaattatc

SEQ ID NO: 3219 - DNA, 25 bp, Homo sapiens
  source 1..25: mol_type = other DNA
gggtgaaagaattatctggcacatt

SEQ ID NO: 3220 - DNA, 25 bp, Homo sapiens
  source 1..25: mol_type = other DNA
aagaattatctggcacattaggtat

SEQ ID NO: 3221 - DNA, 25 bp, Homo sapiens
  source 1..25: mol_type = other DNA
ataactttttttaaaaaaaactaaa

SEQ ID NO: 3222 - DNA, 25 bp, Homo sapiens
  source 1..25: mol_type = other DNA
taaaaggcgcttcatgtccagtgtg

SEQ ID NO: 3223 - DNA, 25 bp, Homo sapiens
  source 1..25: mol_type = other DNA
cagtgtgtggcccttctgaaactta

SEQ ID NO: 3224 - DNA, 25 bp, Homo sapiens
  source 1..25: mol_type = other DNA
atggtcatctctcccactgaaacca

SEQ ID NO: 3225 - DNA, 25 bp, Homo sapiens
  source 1..25: mol_type = other DNA
actgaaaccaaggtcttttcaaatg

SEQ ID NO: 3226 - DNA, 25 bp, Homo sapiens
  source 1..25: mol_type = other DNA
caaggtcttttcaaatgtggctaaa

SEQ ID NO: 3227 - DNA, 25 bp, Homo sapiens
  source 1..25: mol_type = other DNA
aaggtcttttcaaatgtggctaaat

SEQ ID NO: 3228 - DNA, 25 bp, Homo sapiens
  source 1..25: mol_type = other DNA
aggtcttttcaaatgtggctaaatg

SEQ ID NO: 3229 - DNA, 25 bp, Homo sapiens
  source 1..25: mol_type = other DNA
tttcaaatgtggctaaatggggatg

SEQ ID NO: 3230 - DNA, 25 bp, Homo sapiens
  source 1..25: mol_type = other DNA
gtggctaaatggggatgaggagaca

SEQ ID NO: 3231 - DNA, 25 bp, Homo sapiens
  source 1..25: mol_type = other DNA
tggctaaatggggatgaggagacac

SEQ ID NO: 3232 - DNA, 25 bp, Homo sapiens
  source 1..25: mol_type = other DNA
taaatggggatgaggagacacgggt

SEQ ID NO: 3233 - DNA, 25 bp, Homo sapiens
  source 1..25: mol_type = other DNA
tgaggagacacgggtaggactttct

SEQ ID NO: 3234 - DNA, 25 bp, Homo sapiens
  source 1..25: mol_type = other DNA
cattctttaaagagccaagttgctt

SEQ ID NO: 3235 - DNA, 25 bp, Homo sapiens
  source 1..25: mol_type = other DNA
attctttaaagagccaagttgcttc

SEQ ID NO: 3236 - DNA, 25 bp, Homo sapiens
  source 1..25: mol_type = other DNA
ttctttaaagagccaagttgcttcg

SEQ ID NO: 3237 - DNA, 25 bp, Homo sapiens
  source 1..25: mol_type = other DNA
gccaagttgcttcggggaaacagcc

SEQ ID NO: 3238 - DNA, 25 bp, Homo sapiens
  source 1..25: mol_type = other DNA
tgcttcggggaaacagccaggaaaa

SEQ ID NO: 3239 - DNA, 25 bp, Homo sapiens
  source 1..25: mol_type = other DNA
ggaaaatggtcaagattatttttag

SEQ ID NO: 3240 - DNA, 25 bp, Homo sapiens
  source 1..25: mol_type = other DNA
agattatttttagaggttattttat

SEQ ID NO: 3241 - DNA, 25 bp, Homo sapiens
  source 1..25: mol_type = other DNA
gattatttttagaggttattttatt

SEQ ID NO: 3242 - DNA, 25 bp, Homo sapiens
  source 1..25: mol_type = other DNA
attatttttagaggttattttattg

SEQ ID NO: 3243 - DNA, 25 bp, Homo sapiens
  source 1..25: mol_type = other DNA
taacatcttgagttatttttaattc

SEQ ID NO: 3244 - DNA, 25 bp, Homo sapiens
  source 1..25: mol_type = other DNA
aacatcttgagttatttttaattca

SEQ ID NO: 3245 - DNA, 25 bp, Homo sapiens
  source 1..25: mol_type = other DNA
acatcttgagttatttttaattcag

SEQ ID NO: 3246 - DNA, 25 bp, Homo sapiens
  source 1..25: mol_type = other DNA
catcttgagttatttttaattcagg

SEQ ID NO: 3247 - DNA, 25 bp, Homo sapiens
  source 1..25: mol_type = other DNA
gagttatttttaattcagggggatg

SEQ ID NO: 3248 - DNA, 25 bp, Homo sapiens
  source 1..25: mol_type = other DNA
atttttaattcagggggatgtggaa

SEQ ID NO: 3249 - DNA, 25 bp, Homo sapiens
  source 1..25: mol_type = other DNA
gttttgttgtagcttagtatccata

SEQ ID NO: 3250 - DNA, 25 bp, Homo sapiens
  source 1..25: mol_type = other DNA
ttttgttgtagcttagtatccataa

SEQ ID NO: 3251 - DNA, 25 bp, Homo sapiens
  source 1..25: mol_type = other DNA
gcagcttttgttttctgtatgttgt

SEQ ID NO: 3252 - DNA, 25 bp, Homo sapiens
  source 1..25: mol_type = other DNA
cagcttttgttttctgtatgttgtt

SEQ ID NO: 3253 - DNA, 25 bp, Homo sapiens
  source 1..25: mol_type = other DNA
agcttttgttttctgtatgttgttg

SEQ ID NO: 3254 - DNA, 25 bp, Homo sapiens
  source 1..25: mol_type = other DNA
gcttttgttttctgtatgttgttgg

SEQ ID NO: 3255 - DNA, 25 bp, Homo sapiens
  source 1..25: mol_type = other DNA
tcaactttcacacatagcaagcaca

SEQ ID NO: 3256 - DNA, 25 bp, Homo sapiens
  source 1..25: mol_type = other DNA
gcaagcacatggcctccctgatgtc

SEQ ID NO: 3257 - DNA, 25 bp, Homo sapiens
  source 1..25: mol_type = other DNA
tccctgatgtcaggatgcctttgtt

SEQ ID NO: 3258 - DNA, 25 bp, Homo sapiens
  source 1..25: mol_type = other DNA
ctaaaaatttgttcctttttcacta

SEQ ID NO: 3259 - DNA, 25 bp, Homo sapiens
  source 1..25: mol_type = other DNA
taaaaatttgttcctttttcactat

SEQ ID NO: 3260 - DNA, 25 bp, Homo sapiens
  source 1..25: mol_type = other DNA
tttttcactatgggcagttcacaca

SEQ ID NO: 3261 - DNA, 25 bp, Homo sapiens
  source 1..25: mol_type = other DNA
cacaaggcaaaaactattgaacagt

SEQ ID NO: 3262 - DNA, 25 bp, Homo sapiens
  source 1..25: mol_type = other DNA
tgattcttttattaataaaagctaa

SEQ ID NO: 3263 - DNA, 25 bp, Homo sapiens
  source 1..25: mol_type = other DNA
gattcttttattaataaaagctaat

SEQ ID NO: 3264 - DNA, 25 bp, Homo sapiens
  source 1..25: mol_type = other DNA
tttattaataaaagctaatgggaaa

SEQ ID NO: 3265 - DNA, 25 bp, Homo sapiens
  source 1..25: mol_type = other DNA
tttattgataaatctatcctttaaa

SEQ ID NO: 3266 - DNA, 25 bp, Homo sapiens
  source 1..25: mol_type = other DNA
ctatcctttaaaaggaatacgtttt

SEQ ID NO: 3267 - DNA, 25 bp, Homo sapiens
  source 1..25: mol_type = other DNA
aatagtttatgtagagaaacattag

SEQ ID NO: 3268 - DNA, 25 bp, Homo sapiens
  source 1..25: mol_type = other DNA
ttaattgtctccccacctatattta

SEQ ID NO: 3269 - DNA, 25 bp, Homo sapiens
  source 1..25: mol_type = other DNA
taattgtctccccacctatatttat

SEQ ID NO: 3270 - DNA, 25 bp, Homo sapiens
  source 1..25: mol_type = other DNA
agtaaaagtgtatttgtaaactgta

SEQ ID NO: 3271 - DNA, 25 bp, Homo sapiens
  source 1..25: mol_type = other DNA
gtaaaagtgtatttgtaaactgtat

SEQ ID NO: 3272 - DNA, 25 bp, Homo sapiens
  source 1..25: mol_type = other DNA
gtaaactgtatgggaactaaaaatt

SEQ ID NO: 3273 - DNA, 25 bp, Homo sapiens
  source 1..25: mol_type = other DNA
ggaataaaaccattttcttatatga

SEQ ID NO: 3274 - DNA, 25 bp, Homo sapiens
  source 1..25: mol_type = other DNA
gggagagggtgaaagtccacatctg

SEQ ID NO: 3275 - DNA, 25 bp, Homo sapiens
  source 1..25: mol_type = other DNA
agggagagggtgaaagtccacatct

SEQ ID NO: 3276 - DNA, 25 bp, Homo sapiens
  source 1..25: mol_type = other DNA
tagggagagggtgaaagtccacatc

SEQ ID NO: 3277 - DNA, 25 bp, Homo sapiens
  source 1..25: mol_type = other DNA
tctgttcttgatctttttagggaga

SEQ ID NO: 3278 - DNA, 25 bp, Homo sapiens
  source 1..25: mol_type = other DNA
gtctgttcttgatctttttagggag

SEQ ID NO: 3279 - DNA, 25 bp, Homo sapiens
  source 1..25: mol_type = other DNA
cttgcgtctgttcttgatcttttta

SEQ ID NO: 3280 - DNA, 25 bp, Homo sapiens
  source 1..25: mol_type = other DNA
tcttgcgtctgttcttgatcttttt

SEQ ID NO: 3281 - DNA, 25 bp, Homo sapiens
  source 1..25: mol_type = other DNA
atggtttcaaattttgcttatcaaa

SEQ ID NO: 3282 - DNA, 25 bp, Homo sapiens
  source 1..25: mol_type = other DNA
gagttaaaatacagtggtctttaaa

SEQ ID NO: 3283 - DNA, 25 bp, Homo sapiens
  source 1..25: mol_type = other DNA
caggtattgttgagttaaaatacag

SEQ ID NO: 3284 - DNA, 25 bp, Homo sapiens
  source 1..25: mol_type = other DNA
ctgaggaaatgagtaattgggaagc

SEQ ID NO: 3285 - DNA, 25 bp, Homo sapiens
  source 1..25: mol_type = other DNA
ttcttatctgaggaaatgagtaatt

SEQ ID NO: 3286 - DNA, 25 bp, Homo sapiens
  source 1..25: mol_type = other DNA
cttcttatctgaggaaatgagtaat

SEQ ID NO: 3287 - DNA, 25 bp, Homo sapiens
  source 1..25: mol_type = other DNA
tgtagagatgatttcttcttatctg

SEQ ID NO: 3288 - DNA, 25 bp, Homo sapiens
  source 1..25: mol_type = other DNA
ggaaaaaaaaaattaaactggttaa

SEQ ID NO: 3289 - DNA, 25 bp, Homo sapiens
  source 1..25: mol_type = other DNA
aggaaaaaaaaaattaaactggtta

SEQ ID NO: 3290 - DNA, 25 bp, Homo sapiens
  source 1..25: mol_type = other DNA
acaatgaggaaaaaaaaaattaaac

SEQ ID NO: 3291 - DNA, 25 bp, Homo sapiens
  source 1..25: mol_type = other DNA
tttcttctcatcatccccaacaatg

SEQ ID NO: 3292 - DNA, 25 bp, Homo sapiens
  source 1..25: mol_type = other DNA
taaatgagattgttctcacttttct

SEQ ID NO: 3293 - DNA, 25 bp, Homo sapiens
  source 1..25: mol_type = other DNA
gaattatccactactggatacatga

SEQ ID NO: 3294 - DNA, 25 bp, Homo sapiens
  source 1..25: mol_type = other DNA
gccatcaaaatgaattatccactac

SEQ ID NO: 3295 - DNA, 25 bp, Homo sapiens
  source 1..25: mol_type = other DNA
ctcaggcactggcttaattctcatt

SEQ ID NO: 3296 - DNA, 25 bp, Homo sapiens
  source 1..25: mol_type = other DNA
gtcaacttctgacagtctcaggcac

SEQ ID NO: 3297 - DNA, 25 bp, Homo sapiens
  source 1..25: mol_type = other DNA
gcaaaggtcaacttctgacagtctc

SEQ ID NO: 3298 - DNA, 25 bp, Homo sapiens
  source 1..25: mol_type = other DNA
ctatgactctttaatgccagtgcaa

SEQ ID NO: 3299 - DNA, 25 bp, Homo sapiens
  source 1..25: mol_type = other DNA
agccgaactataattggtcaacggc

SEQ ID NO: 3300 - DNA, 25 bp, Homo sapiens
  source 1..25: mol_type = other DNA
caacagccgaactataattggtcaa

SEQ ID NO: 3301 - DNA, 25 bp, Homo sapiens
  source 1..25: mol_type = other DNA
tctcagtcaacagccgaactataat

SEQ ID NO: 3302 - DNA, 25 bp, Homo sapiens
  source 1..25: mol_type = other DNA
caattattcaaatgcaaagaaaata

SEQ ID NO: 3303 - DNA, 25 bp, Homo sapiens
  source 1..25: mol_type = other DNA
tcgttgttttggcgaccaaaaacac

SEQ ID NO: 3304 - DNA, 25 bp, Homo sapiens
  source 1..25: mol_type = other DNA
aaccctattcaaacagtcgttgttt

SEQ ID NO: 3305 - DNA, 25 bp, Homo sapiens
  source 1..25: mol_type = other DNA
ccaaaaaaattcggtgatttcaaaa

SEQ ID NO: 3306 - DNA, 25 bp, Homo sapiens
  source 1..25: mol_type = other DNA
tccaaaaaaattcggtgatttcaaa

SEQ ID NO: 3307 - DNA, 25 bp, Homo sapiens
  source 1..25: mol_type = other DNA
gagtctaactgattgtcaacccccg

SEQ ID NO: 3308 - DNA, 25 bp, Homo sapiens
  source 1..25: mol_type = other DNA
ggtcgagtctaactgattgtcaacc

SEQ ID NO: 3309 - DNA, 25 bp, Homo sapiens
  source 1..25: mol_type = other DNA
gggtcgagtctaactgattgtcaac

SEQ ID NO: 3310 - DNA, 25 bp, Homo sapiens
  source 1..25: mol_type = other DNA
cgggtcgagtctaactgattgtcaa

SEQ ID NO: 3311 - DNA, 25 bp, Homo sapiens
  source 1..25: mol_type = other DNA
tcgggtcgagtctaactgattgtca

SEQ ID NO: 3312 - DNA, 25 bp, Homo sapiens
  source 1..25: mol_type = other DNA
tggtgtactcaccggtggacgtccg

SEQ ID NO: 3313 - DNA, 25 bp, Homo sapiens
  source 1..25: mol_type = other DNA
cgactggtgtactcaccggtggacg

SEQ ID NO: 3314 - DNA, 25 bp, Homo sapiens
  source 1..25: mol_type = other DNA
aggcggctggacgactggtgtactc

SEQ ID NO: 3315 - DNA, 25 bp, Homo sapiens
  source 1..25: mol_type = other DNA
gcttcttcctctctgagtcctgacg

SEQ ID NO: 3316 - DNA, 25 bp, Homo sapiens
  source 1..25: mol_type = other DNA
tctgatgtgcttcttcctctctgag

SEQ ID NO: 3317 - DNA, 25 bp, Homo sapiens
  source 1..25: mol_type = other DNA
cggtgactttctctgatgtgcttct

SEQ ID NO: 3318 - DNA, 25 bp, Homo sapiens
  source 1..25: mol_type = other DNA
ctctccagatcgatgggacggtcgg

SEQ ID NO: 3319 - DNA, 25 bp, Homo sapiens
  source 1..25: mol_type = other DNA
aaccctcgagactcgacgtacactc

SEQ ID NO: 3320 - DNA, 25 bp, Homo sapiens
  source 1..25: mol_type = other DNA
accggtaaagacgaaaactcgagaa

SEQ ID NO: 3321 - DNA, 25 bp, Homo sapiens
  source 1..25: mol_type = other DNA
gaccggtaaagacgaaaactcgaga

SEQ ID NO: 3322 - DNA, 25 bp, Homo sapiens
  source 1..25: mol_type = other DNA
agacctgaattcaaaagtcttccgg

SEQ ID NO: 3323 - DNA, 25 bp, Homo sapiens
  source 1..25: mol_type = other DNA
tgttaagacctgaattcaaaagtct

SEQ ID NO: 3324 - DNA, 25 bp, Homo sapiens
  source 1..25: mol_type = other DNA
tcatcttccctgtgacactgttaag

SEQ ID NO: 3325 - DNA, 25 bp, Homo sapiens
  source 1..25: mol_type = other DNA
agtagtagttatctcccttcatctt

SEQ ID NO: 3326 - DNA, 25 bp, Homo sapiens
  source 1..25: mol_type = other DNA
tagtagtagttatctcccttcatct

SEQ ID NO: 3327 - DNA, 25 bp, Homo sapiens
  source 1..25: mol_type = other DNA
gtagtagtagtagtagtagttatct

SEQ ID NO: 3328 - DNA, 25 bp, Homo sapiens
  source 1..25: mol_type = other DNA
agtagtagtagtagtagtagttatc

SEQ ID NO: 3329 - DNA, 25 bp, Homo sapiens
  source 1..25: mol_type = other DNA
cgaacactgaacaaatcattcatct

SEQ ID NO: 3330 - DNA, 25 bp, Homo sapiens
  source 1..25: mol_type = other DNA
ccgaacactgaacaaatcattcatc

SEQ ID NO: 3331 - DNA, 25 bp, Homo sapiens
  source 1..25: mol_type = other DNA
gtgtgggaaaagaacttagactcga

SEQ ID NO: 3332 - DNA, 25 bp, Homo sapiens
  source 1..25: mol_type = other DNA
agtgtgggaaaagaacttagactcg

SEQ ID NO: 3333 - DNA, 25 bp, Homo sapiens
  source 1..25: mol_type = other DNA
tggttgtgaccgtctgttagactag

SEQ ID NO: 3334 - DNA, 25 bp, Homo sapiens
  source 1..25: mol_type = other DNA
taatatccttggttttccatggcac

SEQ ID NO: 3335 - DNA, 25 bp, Homo sapiens
  source 1..25: mol_type = other DNA
ttttgctaatatccttggttttcca

SEQ ID NO: 3336 - DNA, 25 bp, Homo sapiens
  source 1..25: mol_type = other DNA
caacttctgcttttgctaatatcct

SEQ ID NO: 3337 - DNA, 25 bp, Homo sapiens
  source 1..25: mol_type = other DNA
tactgtaagcagcttcggcttccca

SEQ ID NO: 3338 - DNA, 25 bp, Homo sapiens
  source 1..25: mol_type = other DNA
ttgtcccagctactgtaagcagctt

SEQ ID NO: 3339 - DNA, 25 bp, Homo sapiens
  source 1..25: mol_type = other DNA
agaaatcattcaggaagcttcttga

SEQ ID NO: 3340 - DNA, 25 bp, Homo sapiens
  source 1..25: mol_type = other DNA
ggctcagggctagcagaaatcattc

SEQ ID NO: 3341 - DNA, 25 bp, Homo sapiens
  source 1..25: mol_type = other DNA
agtgctggttccaaaaataggctca

SEQ ID NO: 3342 - DNA, 25 bp, Homo sapiens
  source 1..25: mol_type = other DNA
aagtgctggttccaaaaataggctc

SEQ ID NO: 3343 - DNA, 25 bp, Homo sapiens
  source 1..25: mol_type = other DNA
ttccccaagtgctggttccaaaaat

SEQ ID NO: 3344 - DNA, 25 bp, Homo sapiens
  source 1..25: mol_type = other DNA
tcacaagatcagtttccccaagtgc

SEQ ID NO: 3345 - DNA, 25 bp, Homo sapiens
  source 1..25: mol_type = other DNA
caagtctggggatgccccagtgggg

SEQ ID NO: 3346 - DNA, 25 bp, Homo sapiens
  source 1..25: mol_type = other DNA
tcccaagtctggggatgccccagtg

SEQ ID NO: 3347 - DNA, 25 bp, Homo sapiens
  source 1..25: mol_type = other DNA
ttcccaagtctggggatgccccagt

SEQ ID NO: 3348 - DNA, 25 bp, Homo sapiens
  source 1..25: mol_type = other DNA
tttcccaagtctggggatgccccag

SEQ ID NO: 3349 - DNA, 25 bp, Homo sapiens
  source 1..25: mol_type = other DNA
gaaagagtcacgtttcccaagtctg

SEQ ID NO: 3350 - DNA, 25 bp, Homo sapiens
  source 1..25: mol_type = other DNA
agaaagagtcacgtttcccaagtct

SEQ ID NO: 3351 - DNA, 25 bp, Homo sapiens
  source 1..25: mol_type = other DNA
aagaaagagtcacgtttcccaagtc

SEQ ID NO: 3352 - DNA, 25 bp, Homo sapiens
  source 1..25: mol_type = other DNA
tcactgtggcctgactaaaacccag

SEQ ID NO: 3353 - DNA, 25 bp, Homo sapiens
  source 1..25: mol_type = other DNA
ctgttagggctgttccttctcactg

SEQ ID NO: 3354 - DNA, 25 bp, Homo sapiens
  source 1..25: mol_type = other DNA
attcaacctggctggaggcctgtta

SEQ ID NO: 3355 - DNA, 25 bp, Homo sapiens
  source 1..25: mol_type = other DNA
cattcaacctggctggaggcctgtt

SEQ ID NO: 3356 - DNA, 25 bp, Homo sapiens
  source 1..25: mol_type = other DNA
aaatgagctcattcaacctggctgg

SEQ ID NO: 3357 - DNA, 25 bp, Homo sapiens
  source 1..25: mol_type = other DNA
caaaaatgagctcattcaacctggc

SEQ ID NO: 3358 - DNA, 25 bp, Homo sapiens
  source 1..25: mol_type = other DNA
acaacaaaaatgagctcattcaacc

SEQ ID NO: 3359 - DNA, 25 bp, Homo sapiens
  source 1..25: mol_type = other DNA
tagaacattagcaaatcttactggt

SEQ ID NO: 3360 - DNA, 25 bp, Homo sapiens
  source 1..25: mol_type = other DNA
aatgtagaacattagcaaatcttac

SEQ ID NO: 3361 - DNA, 25 bp, Homo sapiens
  source 1..25: mol_type = other DNA
aggcaaagagggatgtctttggaga

SEQ ID NO: 3362 - DNA, 25 bp, Homo sapiens
  source 1..25: mol_type = other DNA
catatgaggcaaagagggatgtctt

SEQ ID NO: 3363 - DNA, 25 bp, Homo sapiens
  source 1..25: mol_type = other DNA
gatgattcaacatatgaggcaaaga

SEQ ID NO: 3364 - DNA, 25 bp, Homo sapiens
  source 1..25: mol_type = other DNA
ggatgattcaacatatgaggcaaag

SEQ ID NO: 3365 - DNA, 25 bp, Homo sapiens
  source 1..25: mol_type = other DNA
tccgcactggatgattcaacatatg

SEQ ID NO: 3366 - DNA, 25 bp, Homo sapiens
  source 1..25: mol_type = other DNA
gatattttcattgaaatatccgcac

SEQ ID NO: 3367 - DNA, 25 bp, Homo sapiens
  source 1..25: mol_type = other DNA
agaatccaaggaggccacaacttca

SEQ ID NO: 3368 - DNA, 25 bp, Homo sapiens
  source 1..25: mol_type = other DNA
aagccaaagtcagaagaatccaagg

SEQ ID NO: 3369 - DNA, 25 bp, Homo sapiens
  source 1..25: mol_type = other DNA
cagaagccaaagtcagaagaatcca

SEQ ID NO: 3370 - DNA, 25 bp, Homo sapiens
  source 1..25: mol_type = other DNA
aggaactaccaccagggctggatct

SEQ ID NO: 3371 - DNA, 25 bp, Homo sapiens
  source 1..25: mol_type = other DNA
ctcagaaaggaactaccaccagggc

SEQ ID NO: 3372 - DNA, 25 bp, Homo sapiens
  source 1..25: mol_type = other DNA
agacctcagaaaggaactaccacca

SEQ ID NO: 3373 - DNA, 25 bp, Homo sapiens
  source 1..25: mol_type = other DNA
gagacctcagaaaggaactaccacc

SEQ ID NO: 3374 - DNA, 25 bp, Homo sapiens
  source 1..25: mol_type = other DNA
ctcaagggactgagagacctcagaa

SEQ ID NO: 3375 - DNA, 25 bp, Homo sapiens
  source 1..25: mol_type = other DNA
cagccaaactaccccaaagtctcaa

SEQ ID NO: 3376 - DNA, 25 bp, Homo sapiens
  source 1..25: mol_type = other DNA
gcagccaaactaccccaaagtctca

SEQ ID NO: 3377 - DNA, 25 bp, Homo sapiens
  source 1..25: mol_type = other DNA
ctgatatacattttgtcagtgagaa

SEQ ID NO: 3378 - DNA, 25 bp, Homo sapiens
  source 1..25: mol_type = other DNA
aaggaatattggggggtggaggtgg

SEQ ID NO: 3379 - DNA, 25 bp, Homo sapiens
  source 1..25: mol_type = other DNA
caaggaatattggggggtggaggtg

SEQ ID NO: 3380 - DNA, 25 bp, Homo sapiens
  source 1..25: mol_type = other DNA
tcaaggaatattggggggtggaggt

SEQ ID NO: 3381 - DNA, 25 bp, Homo sapiens
  source 1..25: mol_type = other DNA
ttcaaggaatattggggggtggagg

SEQ ID NO: 3382 - DNA, 25 bp, Homo sapiens
  source 1..25: mol_type = other DNA
aagttcaaggaatattggggggtgg

SEQ ID NO: 3383 - DNA, 25 bp, Homo sapiens
  source 1..25: mol_type = other DNA
tcaaagttcaaggaatattgggggg

SEQ ID NO: 3384 - DNA, 25 bp, Homo sapiens
  source 1..25: mol_type = other DNA
aattcaaagttcaaggaatattggg

SEQ ID NO: 3385 - DNA, 25 bp, Homo sapiens
  source 1..25: mol_type = other DNA
caattcaaagttcaaggaatattgg

SEQ ID NO: 3386 - DNA, 25 bp, Homo sapiens
  source 1..25: mol_type = other DNA
gcaattcaaagttcaaggaatattg

SEQ ID NO: 3387 - DNA, 25 bp, Homo sapiens
  source 1..25: mol_type = other DNA
agcaattcaaagttcaaggaatatt

SEQ ID NO: 3388 - DNA, 25 bp, Homo sapiens
  source 1..25: mol_type = other DNA
aagcaattcaaagttcaaggaatat

SEQ ID NO: 3389 - DNA, 25 bp, Homo sapiens
  source 1..25: mol_type = other DNA
gtgttctgaagcaattcaaagttca

SEQ ID NO: 3390 - DNA, 25 bp, Homo sapiens
  source 1..25: mol_type = other DNA
acttccctaataagggaataccttc

SEQ ID NO: 3391 - DNA, 25 bp, Homo sapiens
  source 1..25: mol_type = other DNA
gacagcagtgacacttccctaataa

SEQ ID NO: 3392 - DNA, 25 bp, Homo sapiens
  source 1..25: mol_type = other DNA
agacagcagtgacacttccctaata

SEQ ID NO: 3393 - DNA, 25 bp, Homo sapiens
  source 1..25: mol_type = other DNA
aagcttcttgctgcaaatactgaac

SEQ ID NO: 3394 - DNA, 25 bp, Homo sapiens
  source 1..25: mol_type = other DNA
aagtcaagacaaaaccaaagcaaaa

SEQ ID NO: 3395 - DNA, 25 bp, Homo sapiens
  source 1..25: mol_type = other DNA
tttgtacaatcaaactcttgtgtgc

SEQ ID NO: 3396 - DNA, 25 bp, Homo sapiens
  source 1..25: mol_type = other DNA
ataaaagcaactgatcttaagcaac

SEQ ID NO: 3397 - DNA, 25 bp, Homo sapiens
  source 1..25: mol_type = other DNA
tcttataacaaaactagccaagatc

SEQ ID NO: 3398 - DNA, 25 bp, Homo sapiens
  source 1..25: mol_type = other DNA
catgatagtttgctgacctcgtgga

SEQ ID NO: 3399 - DNA, 25 bp, Homo sapiens
  source 1..25: mol_type = other DNA
acatgatagtttgctgacctcgtgg

SEQ ID NO: 3400 - DNA, 25 bp, Homo sapiens
  source 1..25: mol_type = other DNA
agaacatgatagtttgctgacctcg

SEQ ID NO: 3401 - DNA, 25 bp, Homo sapiens
  source 1..25: mol_type = other DNA
ctagggactatgataactctggcct

SEQ ID NO: 3402 - DNA, 25 bp, Homo sapiens
  source 1..25: mol_type = other DNA
agcaacctagggactatgataactc

SEQ ID NO: 3403 - DNA, 25 bp, Homo sapiens
  source 1..25: mol_type = other DNA
gcacatgataagccgtagcaaccta

SEQ ID NO: 3404 - DNA, 25 bp, Homo sapiens
  source 1..25: mol_type = other DNA
agcacatgataagccgtagcaacct

SEQ ID NO: 3405 - DNA, 25 bp, Homo sapiens
  source 1..25: mol_type = other DNA
ctgacttcctcagaaaccacctctt

SEQ ID NO: 3406 - DNA, 25 bp, Homo sapiens
  source 1..25: mol_type = other DNA
acccattactgactgctctggccct

SEQ ID NO: 3407 - DNA, 25 bp, Homo sapiens
  source 1..25: mol_type = other DNA
cacccattactgactgctctggccc

SEQ ID NO: 3408 - DNA, 25 bp, Homo sapiens
  source 1..25: mol_type = other DNA
ctcattcacccattactgactgctc

SEQ ID NO: 3409 - DNA, 25 bp, Homo sapiens
  source 1..25: mol_type = other DNA
tacccaccagcaacctagaagtaga

SEQ ID NO: 3410 - DNA, 25 bp, Homo sapiens
  source 1..25: mol_type = other DNA
taattttaaaatcctcagtgagcta

SEQ ID NO: 3411 - DNA, 25 bp, Homo sapiens
  source 1..25: mol_type = other DNA
aaaaagttattaagactgtgaaatt

SEQ ID NO: 3412 - DNA, 25 bp, Homo sapiens
  source 1..25: mol_type = other DNA
cataagtttcagaagggccacacac

SEQ ID NO: 3413 - DNA, 25 bp, Homo sapiens
  source 1..25: mol_type = other DNA
ggagagatgaccataagtttcagaa

SEQ ID NO: 3414 - DNA, 25 bp, Homo sapiens
  source 1..25: mol_type = other DNA
gggagagatgaccataagtttcaga

SEQ ID NO: 3415 - DNA, 25 bp, Homo sapiens
  source 1..25: mol_type = other DNA
catttgaaaagaccttggtttcagt

SEQ ID NO: 3416 - DNA, 25 bp, Homo sapiens
  source 1..25: mol_type = other DNA
acatttgaaaagaccttggtttcag

SEQ ID NO: 3417 - DNA, 25 bp, Homo sapiens
  source 1..25: mol_type = other DNA
catttagccacatttgaaaagacct

SEQ ID NO: 3418 - DNA, 25 bp, Homo sapiens
  source 1..25: mol_type = other DNA
tcctggctgtttccccgaagcaact

SEQ ID NO: 3419 - DNA, 25 bp, Homo sapiens
  source 1..25: mol_type = other DNA
ctaaaaataatcttgaccattttcc

SEQ ID NO: 3420 - DNA, 25 bp, Homo sapiens
  source 1..25: mol_type = other DNA
atgtctatagtctaagtttccctta

SEQ ID NO: 3421 - DNA, 25 bp, Homo sapiens
  source 1..25: mol_type = other DNA
aacatacagaaaacaaaagctgcac

SEQ ID NO: 3422 - DNA, 25 bp, Homo sapiens
  source 1..25: mol_type = other DNA
taacaaaggcatcctgacatcaggg

SEQ ID NO: 3423 - DNA, 25 bp, Homo sapiens
  source 1..25: mol_type = other DNA
tcctaacaaaggcatcctgacatca

SEQ ID NO: 3424 - DNA, 25 bp, Homo sapiens
  source 1..25: mol_type = other DNA
atcctaacaaaggcatcctgacatc

SEQ ID NO: 3425 - DNA, 25 bp, Homo sapiens
  source 1..25: mol_type = other DNA
taagggcaaatacagatcctaacaa

SEQ ID NO: 3426 - DNA, 25 bp, Homo sapiens
  source 1..25: mol_type = other DNA
ggaaaaaagatttcaacaaaattaa

SEQ ID NO: 3427 - DNA, 25 bp, Homo sapiens
  source 1..25: mol_type = other DNA
aggaaaaaagatttcaacaaaatta

SEQ ID NO: 3428 - DNA, 25 bp, Homo sapiens
  source 1..25: mol_type = other DNA
attttggaacttttcaagaggaaga

SEQ ID NO: 3429 - DNA, 25 bp, Homo sapiens
  source 1..25: mol_type = other DNA
aaactatattttggaacttttcaag

SEQ ID NO: 3430 - DNA, 25 bp, Homo sapiens
  source 1..25: mol_type = other DNA
atgaaagatacaataaactatattt

SEQ ID NO: 3431 - DNA, 25 bp, Homo sapiens
  source 1..25: mol_type = other DNA
ttgtgtgaactgcccatagtgaaaa

SEQ ID NO: 3432 - DNA, 25 bp, Homo sapiens
  source 1..25: mol_type = other DNA
ttattaattacatgatttgaggctt

SEQ ID NO: 3433 - DNA, 25 bp, Homo sapiens
  source 1..25: mol_type = other DNA
ggcaaattattaattacatgatttg

SEQ ID NO: 3434 - DNA, 25 bp, Homo sapiens
  source 1..25: mol_type = other DNA
aatcacaattaggtcataaataaac

SEQ ID NO: 3435 - DNA, 25 bp, Homo sapiens
  source 1..25: mol_type = other DNA
ttttattaataaaagaatcacaatt

SEQ ID NO: 3436 - DNA, 25 bp, Homo sapiens
  source 1..25: mol_type = other DNA
gtaggtctagtcatcagcttaatca

SEQ ID NO: 3437 - DNA, 25 bp, Homo sapiens
  source 1..25: mol_type = other DNA
tgtaggtctagtcatcagcttaatc

SEQ ID NO: 3438 - DNA, 25 bp, Homo sapiens
  source 1..25: mol_type = other DNA
catatactgcaggaaaattaattgt

SEQ ID NO: 3439 - DNA, 25 bp, Homo sapiens
  source 1..25: mol_type = other DNA
tctggtacaatacttcatatactgc

SEQ ID NO: 3440 - DNA, 25 bp, Homo sapiens
  source 1..25: mol_type = other DNA
aaatattacatatcttttaatactc

SEQ ID NO: 3441 - DNA, 25 bp, Homo sapiens
  source 1..25: mol_type = other DNA
acatcctaaaacgtattccttttaa

SEQ ID NO: 3442 - DNA, 25 bp, Homo sapiens
  source 1..25: mol_type = other DNA
gactacataatatacgtgggcaaaa

SEQ ID NO: 3443 - DNA, 25 bp, Homo sapiens
  source 1..25: mol_type = other DNA
tgcaaatagactacataatatacgt

SEQ ID NO: 3444 - DNA, 25 bp, Homo sapiens
  source 1..25: mol_type = other DNA
ttgcaaatagactacataatatacg

SEQ ID NO: 3445 - DNA, 25 bp, Homo sapiens
  source 1..25: mol_type = other DNA
gcgctaacacccataaatataggtg

SEQ ID NO: 3446 - DNA, 25 bp, Homo sapiens
  source 1..25: mol_type = other DNA
tgcgctaacacccataaatataggt

SEQ ID NO: 3447 - DNA, 25 bp, Homo sapiens
  source 1..25: mol_type = other DNA
ttgcgctaacacccataaatatagg

SEQ ID NO: 3448 - DNA, 25 bp, Homo sapiens
  source 1..25: mol_type = other DNA
cagttgcgctaacacccataaatat

SEQ ID NO: 3449 - DNA, 25 bp, Homo sapiens
  source 1..25: mol_type = other DNA
cgacaaatgccatcatataagaaaa
